(19) United States
(12) Patent Application Publication
(10) Pub. No.: US 2014/0348747 A1
(43) Pub. Date: Nov. 27, 2014

(54) ACTIVATION OF BIOLUMINESCENCE BY STRUCTURAL COMPLEMENTATION

(71) Applicant: Promega Corporation, Madison, WI (US)

(72) Inventors: Andrew S. Dixon, Verona, WI (US); Lance Encell, Fitchburg, WI (US); Mary Hall, Waunakee, WI (US); Keith Wood, Mt. Horeb, WI (US); Monika Wood, Mt. Horeb, WI (US); Marie Schwinn, Madison, WI (US); Brock F. Binkowski, Sauk City, WI (US); Hicham Zegzouti, Madison, WI (US); Nidhi Nath, Madison, WI (US); Subhanjan Mondal, Middleton, WI (US); Said Goueli, Fitchburg, WI (US); Poncho Meisenheimer, San Luis Obispo, CA (US); Thomas Kirkland, Atascadero, CA (US); James Unch, Arroyo Grande, CA (US); Dileep K. Pulukkunat, Middleton, WI (US); Matthew Robers, Madison, WI (US); Melanie Dart, Madison, WI (US); Thomas Machleidt, Madison, WI (US)

(73) Assignee: Promega Corporation, Madison, WI (US)

(21) Appl. No.: 14/209,546

(22) Filed: Mar. 13, 2014

Related U.S. Application Data
(60) Provisional application No. 61/791,549, filed on Mar. 15, 2013.

(51) Int. Cl. G01N 33/533; A61K 51/08

(52) U.S. Cl. CPC G01N 33/533; A61K 51/08
USPC 424/1.69; 530/327; 536/23.1; 536/23.4; 530/350; 435/7.92; 435/6.11

(57) ABSTRACT

Provided herein are compositions and methods for the assembly of a bioluminescent complex from two or more non-luminescent (e.g., substantially non-luminescent) peptide and/or polypeptide units. In particular, bioluminescent activity is conferred upon a non-luminescent polypeptide via structural complementation with another, complementary non-luminescent peptide.

### CROSS-REFERENCE TO RELATED APPLICATION

[0001] The present application claims priority to U.S. Provisional Patent Application Ser. No. 61/791,549 filed Mar. 15, 2013, which is hereby incorporated by reference in its entirety.

### FIELD

[0002] Provided herein are compositions and methods for the assembly of a bioluminescent complex from two or more non-luminescent (e.g., substantially non-luminescent) peptide and/or polypeptide units. In particular, bioluminescent activity is conferred upon a non-luminescent polypeptide via structural complementation with another, complementary non-luminescent peptide.

### BACKGROUND

[0003] Biological processes rely on covalent and non-covalent interactions between molecules, macromolecules and molecular complexes. In order to understand such processes, and to develop techniques and compounds to manipulate them for research, clinical and other practical applications, it is necessary to have tools available to detect and monitor these interactions. The study of these interactions, particularly under physiological conditions (e.g. at normal expression levels for monitoring protein interactions), requires high sensitivity.

### SUMMARY

[0004] The present invention relates to compositions comprising complementary non-luminescent amino acid chains (e.g., substantially non-luminescent peptides and/or polypeptides that are not fragments of a preexisting protein), complexes thereof, and methods of generating an optically detectable bioluminescent signal upon association of the non-luminescent amino acid chains (e.g., peptides and/or polypeptides). In some embodiments, the present invention provides two or more non-luminescent, or substantially non-luminescent peptides and/or polypeptides, that, when brought together, assemble into a bioluminescent complex. In some embodiments, a pair of substantially non-luminescent peptide and/or polypeptide units assembles into a bioluminescent complex. In other embodiments, three or more substantially non-luminescent peptide and/or polypeptide units assemble into a bioluminescent complex (e.g., ternary complex, tertiary complex, etc.). Provided herein are technologies for detecting interactions between molecular entities (e.g., proteins, nucleic acids, carbohydrates, small molecules (e.g., small molecule libraries)) by correlating such interactions to the formation of a bioluminescent complex of otherwise non-luminescent (e.g., substantially non-luminescent) amino acid chains.

[0005] In some embodiments, the assembled pair catalyzes a chemical reaction of an appropriate substrate into a high energy state, and light is emitted upon return of the substrate to a more stable form. In some embodiments, a bioluminescent complex exhibits luminescence in the presence of substrate (e.g., coelenterazine, furimazine, etc.).

[0006] Although the embodiments described herein primarily describe and refer to complementary, non-luminescent amino acid chains that form bioluminescent complexes, it is noted that the present technology can equally be applied to other enzymatic activities. The embodiments described herein relating to luminescence should be viewed as applying to complementary, substantially non-enzymatically active amino acid chains (e.g., peptides and/or polypeptides that are not fragments of a preexisting protein), complexes thereof, and methods of generating an enzymatic activity upon association of the complementary, substantially non-enzymatically active amino acid chains (e.g., peptides and/or polypeptides). Further, embodiments described herein that refer to non-luminescent peptides and/or polypeptides are applied, in some embodiments, to substantially non-luminescent peptides and/or polypeptides.

[0007] The invention is further directed to assays for the detection of molecular interactions between molecules of interest by linking the interaction of a pair of non-luminescent peptides/polypeptides to the interaction molecules of interest (e.g., transient association, stable association, complex formation, etc.). In such embodiments, a pair of a non-luminescent elements are tethered (e.g., fused) to molecules of interest and assembly of the bioluminescent complex is operated by the molecular interaction of the molecules of interest. If the molecules of interest engage in a sufficiently stable interaction, the bioluminescent complex forms, and a bioluminescent signal is generated. If the molecules of interest fail to engage in a sufficiently stable interaction, the bioluminescent complex will not form or only form weakly, and a bioluminescent signal is not detectable or is substantially reduced (e.g., substantially undetectable, essentially not detectable, etc.). In some embodiments, the magnitude of the detectable bioluminescent signal is proportional (e.g., directly proportional) to the strength, favorability, and/or stability of the molecular interactions between the molecules of interest.

[0008] In some embodiments, the present invention provides peptides comprising an amino acid sequence having less than 100% and greater than 40% (e.g., >40%, >45%, >50%, >55%, >60%, >65%, >70%, >75%, >80%, >85%, >90%, >95%, >98%, >99%) sequence identity with SEQ ID NO: 2, wherein a detectable bioluminescent signal is produced when the peptide contacts a polypeptide consisting of SEQ ID NO: 440. In some embodiments, a detectable bioluminescent signal is produced when the peptide contacts a polypeptide having less than 100% and greater than 40% (e.g., >40%, >45%, >50%, >55%, >60%, >65%, >70%, >75%, >80%, >85%, >90%, >95%, >98%, >99%) sequence identity with SEQ ID NO: 440. In certain embodiments, the detectable bioluminescent signal is produced, or is substantially increased, when the peptide associates with the polypeptide comprising or consisting of SEQ ID NO: 440, or a portion thereof. In preferred embodiments, the peptide exhibits alteration (e.g., enhancement) of one or more traits compared to a peptide of SEQ ID NO: 2, wherein the traits are selected from: affinity for the polypeptide consisting of SEQ ID NO: 440, expression, intracellular solubility, intracellular stability and bioluminescent activity when combined with the polypeptide consisting of SEQ ID NO: 440. Although not limited to these sequences, the peptide amino acid sequence may be selected from amino acid sequences of SEQ ID NOS: 3-438. In some embodiments, fusion polypeptides are provided that comprise: (a) an above described peptide, and (b) a first interaction polypeptide that forms a duplex with a second interaction polypeptide upon contact of the first interaction polypeptide and the second interaction polypeptide. In certain embodiments, bioluminescent complexes are provided that comprise: (a) a first fusion polypeptide described above and (b) a second fusion polypeptide comprising: (i) the second interaction polypeptide and (ii) a complement polypeptide that emits a detectable bioluminescent signal when associated with the peptide comprising an amino acid sequence having less than 100% and greater than 40% sequence identity with SEQ ID NO: 2; wherein the first fusion polypeptide and second fusion polypeptide are associated; and wherein the peptide comprising an amino acid sequence having less than 100% and greater than 40% sequence identity with SEQ ID NO: 2 and the complement polypeptide are associated.

[0009] In some embodiments, the present invention provides polypeptides comprising an amino acid sequence having less than 100% and greater than 40% (e.g., >40%, >45%, >50%, >55%, >60%, >65%, >70%, >75%, >80%, >85%, >90%, >95%, >98%, >99%) sequence identity with SEQ ID NO: 440, wherein a detectable bioluminescent signal is produced when the polypeptide contacts a peptide consisting of SEQ ID NO: 2. In some embodiments, a detectable bioluminescent signal is produced when the polypeptide contacts a peptide having less than 100% and greater than 40% (e.g., >40%, >45%, >50%, >55%, >60%, >65%, >70%, >75%, >80%, >85%, >90%, >95%, >98%, >99%) sequence identity with SEQ ID NO: 2. In some embodiments, the polypeptide exhibits alteration (e.g., enhancement) of one or more traits compared to a peptide of SEQ ID NO: 440, wherein the traits are selected from: affinity for the peptide consisting of SEQ ID NO: 2, expression, intracellular solubility, intracellular stability, and bioluminescent activity when combined with the peptide consisting of SEQ ID NO: 2. Although not limited to such sequences, the polypeptide amino acid sequence may be selected from one of the amino acid sequences of SEQ ID NOS: 441-2156. In some embodiments, the detectable bioluminescent signal is produced when the polypeptide associates with the peptide consisting of SEQ ID NO: 2. In some embodiments, a fusion polypeptide is provided that comprises: (a) a polypeptide described above and (b) a first interaction polypeptide that forms a duplex with a second interaction polypeptide upon contact of the first interaction polypeptide and the second interaction polypeptide. In certain embodiments, a bioluminescent complex is provided that comprises: (a) a first fusion polypeptide described above; and (b) a second fusion polypeptide comprising: (i) the second interaction polypeptide and (ii) a complement peptide that causes the polypeptide comprising an amino acid sequence having less than 100% and greater than 40% (e.g., >40%, >45%, >50%, >55%, >60%, >65%, >70%, >75%, >80%, >85%, >90%, >95%, >98%, >99%) sequence identity with SEQ ID NO: 440 to emit a detectable bioluminescent signal when an association is formed between the two; wherein the first fusion polypeptide and second fusion polypeptide are associated; and wherein the polypeptide comprising an amino acid sequence having less than 100% and greater than 40% (e.g., >40%, >45%, >50%, >55%, >60%, >65%, >70%, >75%, >80%, >85%, >90%, >95%, >98%, >99%) sequence identity with SEQ ID NO: 440 and the complement peptide are associated.

[0010] In some embodiments, the present invention provides nucleic acids (e.g., DNA, RNA, etc.), oligonucleotides, vectors, etc., that code for any of the peptides, polypeptides, fusion proteins, etc., described herein. In some embodiments, a nucleic acid comprising or consisting of one of the nucleic acid sequences of SEQ ID NOS: 3-438 (coding for non-luminescent peptides) and/or SEQ ID NOS 441-2156 (coding for non-luminescent polypeptides) are provided. In some embodiments, other nucleic acid sequences coding for amino acid sequences of SEQ ID NOS: 3-438 and/or SEQ ID NOS 441-2156 are provided.

[0011] In certain embodiments, the present invention provides bioluminescent complexes comprising: (a) a peptide comprising a peptide amino acid sequence having less than 100% and greater than 40% (e.g., >40%, >45%, >50%, >55%, >60%, >65%, >70%, >75%, >80%, >85%, >90%, >95%, >98%, >99%) sequence identity with SEQ ID NO: 2; and (b) a polypeptide comprising a polypeptide amino acid sequence having less than 100% and greater than 40% (e.g., >40%, >45%, >50%, >55%, >60%, >65%, >70%, >75%, >80%, >85%, >90%, >95%, >98%, >99%) sequence identity with SEQ ID NO: 440, wherein the bioluminescent complex exhibits detectable luminescence. Although not limited to particular sequences, in some embodiments, the peptide amino acid sequence is selected from one of the amino acid sequences provided in SEQ ID NOS: 3-438.

[0012] In various embodiments, bioluminescent complexes are provided that comprise: (a) a first amino acid sequence that is not a fragment of a preexisting protein; and (b) a second amino acid sequence that is not a fragment of a preexisting protein, wherein the bioluminescent complex exhibits detectable luminescence, wherein the first amino acid sequence and the second amino acid sequence are associated, and wherein the bioluminescent complex emits a detectable bioluminescent signal when the first amino acid sequence and the second amino acid sequence are associated. Some such bioluminescent complexes further comprise: (c) a third amino acid sequence comprising a first member of an interaction pair, wherein the third amino acid sequence is covalently attached to the first amino acid sequence; and (d) a fourth amino acid sequence comprising a second member of an interaction pair, wherein the fourth amino acid sequence is covalently attached to the second amino acid sequence. In certain embodiments, interactions (e.g., non-covalent interactions (e.g., hydrogen bonds, ionic bonds, van der Waals forces, hydrophobic interactions, etc.) covalent interactions (e.g., disulfide bonds), etc.) between the first amino acid sequence and the second amino acid sequence do not significantly associate the first amino acid sequence and the second amino acid sequence in the absence of the interactions between the first member and the second member of the interaction pair. In some embodiments, a first polypeptide chain comprises the first amino acid sequence and the third amino acid sequence, and wherein a second polypeptide chain comprises the second amino acid sequence and the fourth amino acid sequence. In some embodiments, the first polypeptide chain and the second polypeptide chain are expressed within a cell.

[0013] In some embodiments, the present invention provides a bioluminescent complex comprising: (a) a pair of non-luminescent elements, wherein each non-luminescent element is not a fragment of a preexisting protein; (b) an interaction pair, wherein each interaction element of the interaction pair is covalently attached to one of the non-luminescent elements.

[0014] Various embodiments described herein provide methods of detecting an interaction between a first amino acid sequence and a second amino acid sequence comprising, for example, the steps of: (a) attaching the first amino acid sequence to a third amino acid sequence and attaching the second amino acid sequence to a fourth amino acid sequence, wherein the third and fourth amino acid sequences are not fragments of a preexisting protein, wherein a complex of the third and fourth amino acid sequences emits a detectable bioluminescent signal (e.g., substantially increased bioluminescence relative to the polypeptide chains separately), wherein the non-covalent interactions between the third and fourth amino acid sequences are insufficient to form, or only weakly form, a complex of the third and fourth amino acid sequences in the absence of additional stabilizing and/or aggregating forces, and wherein a interaction between the first amino acid sequence and the second amino acid sequence provides the additional stabilizing and/or aggregating forces to produce a complex of the third and fourth amino acid sequences; (b) placing the first, second, third, and fourth amino acid sequences of step (a) in conditions to allow for interactions between the first amino acid sequence and the second amino acid sequence to occur; and (c) detecting the bioluminescent signal emitted by the complex of the third and fourth amino acid sequences, wherein detection of the bioluminescent signal indicates an interaction between the first amino acid sequence and the second amino acid sequence. In some embodiments, attaching the first amino acid sequence to the third amino acid sequence and the second amino acid sequence to the fourth amino acid sequence comprises forming a first fusion protein comprising the first amino acid sequence and the third amino acid sequence and forming a second fusion protein comprising the second amino acid sequence and the fourth amino acid sequence. In some embodiments, the first fusion protein and the second fusion protein further comprise linkers between said first and third amino acid sequences and said second and fourth amino acid sequences, respectively. In certain embodiments, the first fusion protein is expressed from a first nucleic acid sequence coding for the first and third amino acid sequences, and the second fusion protein is expressed from a second nucleic acid sequence coding for the second and fourth amino acid sequences. In some embodiments, a single vector comprises the first nucleic acid sequence and the second nucleic acid sequence. In other embodiments, the first nucleic acid sequence and the second nucleic acid sequence are on separate vectors. In certain embodiments, the steps of (a) “attaching” and (b) “placing” comprise expressing the first and second fusion proteins within a cell.

[0015] Provided herein are methods of creating, producing, generating, and/or optimizing a pair of non-luminescent elements comprising: (a) aligning the sequences of three or more related proteins; (b) determining a consensus sequence for the related proteins; (c) providing first and second fragments of a protein related to three or more proteins (or providing first and second fragments of one of the three or more proteins), wherein the fragments are individually substantially non-luminescent but exhibit luminescence upon interaction of the fragments; (d) mutating the first and second fragments at one or more positions each, wherein the mutations alter the sequences of the fragments to be more similar to a corresponding portion of the consensus sequence (e.g., wherein the mutating results in a pair of non-luminescent elements that are not fragments of a preexisting protein), and (e) testing the pair of non-luminescent elements for the absence (e.g., essential absence, substantial absence, etc.) of luminescence when unassociated, and luminescence upon association of the non-luminescent pair into a bioluminescent complex. Examples of such a process are described in Examples 1-5. In some embodiments, the non-luminescent elements exhibit enhancement of one or more traits compared to the first and second fragments, wherein the traits are selected from: increased reconstitution affinity, decreased reconstitution affinity, enhanced expression, increased intracellular solubility, increased intracellular stability, and increased intensity of reconstituted luminescence.

[0016] In some embodiments, the present invention provides detection reagents comprising: (a) a polypeptide comprising an amino acid sequence having less than 100% and greater than 40% sequence identity with SEQ ID NO: 440, wherein a detectable bioluminescent signal is produced when the polypeptide contacts a peptide consisting of SEQ ID NO: 2, and (b) a substrate for a bioluminescent complex produced by the polypeptide and a peptide consisting of SEQ ID NO: 2. In some embodiments, the present invention provides detection reagents comprising: (a) a peptide comprising an amino acid sequence having less than 100% and greater than 40% sequence identity with SEQ ID NO: 2, wherein a detectable bioluminescent signal is produced when the peptide contacts a polypeptide consisting of SEQ ID NO: 440, and (b) a substrate for a bioluminescent complex produced by the peptide and a polypeptide consisting of SEQ ID NO: 440.

### BRIEF DESCRIPTION OF THE DRAWINGS

[0017] FIG. 1 shows a graph depicting the effect of various mutations of the GVTGWRLCKRISA (SEQ ID NO: 236) peptide on luminescence resulting from complementation with SEQ ID NO: 440.

[0018] FIG. 2 shows a graph depicting the effect of various mutations of the SEQ ID NO: 440 polypeptide on luminescence resulting from complementation with GVTGWRLCKRISA (SEQ ID NO: 236) or GVTGWRLFKRISA (SEQ ID NO: 108) peptides.

[0019] FIG. 3A shows the luminescence (RLUs) detected in each non-luminescent polypeptide (NLpoly) mutant containing a single glycine to alanine substitution. FIG. 3B shows the fold increase in luminescence over wild-type.

[0020] FIG. 4A show the luminescence (RLUs) detected in each NLpoly mutant containing a composite of glycine to alanine substitutions. FIG. 4B shows the fold increase in luminescence over wild-type.

[0021] FIG. 5 shows a graph depicting the luminescence (RLUs) detected in HT-NLpeptide fusions.

[0022] FIG. 6 shows a graph depicting the luminescence (RLUs) detected in NLpeptide-HT fusions.

[0023] FIG. 7 shows a graph depicting the luminescence (RLUs) detected in NLpeptide-HT fusions.

[0024] FIG. 8 shows the luminescence (RLUs) generated by a luminescent complex after freeze-thaw cycles of non-luminescent peptide (NLpep).

[0025] FIG. 9 shows concentration normalized activity of peptides, and the TMR gel used to determine the relative concentrations.NLpep concentration FIG. 10 shows a graph of the luminescence of various mutations of residue R11 of NLpoly-5A2 in the presence of NLpep53 (top) and in the absence of complimentary peptide (bottom).

[0026] FIG. 11 shows a graph of the luminescence of various mutations of residue A15 of NLpoly 5A2 in the presence of NLpep53 (top) and in the absence of complimentary peptide (bottom).

[0027] FIG. 12 shows a graph of the luminescence of various mutations of residue L18 of NLpoly 5A2 in the presence of NLpep53 (top) and in the absence of complimentary peptide (bottom).

[0028] FIG. 13 shows a graph of the luminescence of various mutations of residue F31 of NLpoly 5A2 in the presence of NLpep53 (top) and in the absence of complimentary peptide (bottom).

[0029] FIG. 14 shows a graph of the luminescence of various mutations of residue V58 of NLpoly 5A2 in the presence of NLpep53 (top) and in the absence of complimentary peptide (bottom).

[0030] FIG. 15 shows a graph of the luminescence of various mutations of residue A67 of NLpoly 5A2 in the presence of NLpep53 (top) and in the absence of complimentary peptide (bottom).

[0031] FIG. 16 shows a graph of the luminescence of various mutations of residue M106 of NLpoly 5A2 in the presence of NLpep53 (top) and in the absence of complimentary peptide (bottom).

[0032] FIG. 17 shows a graph of the luminescence of various mutations of residue L149 of NLpoly 5A2 in the presence of NLpep53 (top) and in the absence of complimentary peptide (bottom).

[0033] FIG. 18 shows a graph of the luminescence of various mutations of residue V157 of NLpoly 5A2 in the presence of NLpep53 (top) and in the absence of complimentary peptide (bottom).

[0034] FIG. 19 shows a graph of the luminescence of NLpep-HT fusions.

[0035] FIG. 20 shows a graph of the luminescence of NLpep-HT fusions, and a TMR gel indicating their relative expression levels.

[0036] FIG. 21 shows a graph of the luminescence of NLpep-HT fusions.

[0037] FIG. 22 shows a graph of the luminescence of NLpoly 5A2 (top) and NLpoly5A2+R11E in the presence of various NLpeps (bottom).

[0038] FIG. 23 shows a graph of the luminescence of NLpep-HT fusions.

[0039] FIG. 24 shows a graph of the luminescence of NLpolys 1-13 with NLpep53 (top) and without complimentary peptide (bottom).

[0040] FIG. 25 shows a graph of the luminescence of various NLpolys with NLpep53 with NANOGLO or DMEM buffer and furimazine or coelenterazine substrate.

[0041] FIG. 26 shows a graph comparing luminescence in the presence of a ratio of furimazine with coelenterazine for various NLpolys and NLpep53.

[0042] FIG. 27 shows a graph comparing luminescence in the presence of a ratio of furimazine to coelenterazine for various NLpolys and NLpep53.

[0043] FIG. 28 shows a graph comparing luminescence in the presence of furimazine with coelenterazine for various NLpolys and NLpep53 in HEK293 cell lysate.

[0044] FIG. 29 shows a graph of the luminescence of various combinations of NLpoly and NLpep pairs in DMEM buffer with furimazine.

[0045] FIG. 30 shows a graph of the signal/background luminescence of various combinations of NLpoly and NLpep pairs in DMEM buffer with furimazine.

[0046] FIG. 31 shows a graph of luminescence and substrate specificity of various NLpoly mutants with NLpep69 using either furimazine or coelenterazine as a substrate.

[0047] FIG. 32 shows a comparison of luminescence and substrate specificity of various NLpoly mutants with NLpep69 using either furimazine or coelenterazine as a substrate, and under either lytic (bottom graph) or live cell (top graph) conditions.

[0048] FIG. 33 shows a comparison of luminescence and substrate specificity of NLpoly mutants with NLpep78 using either furimazine or coelenterazine as a substrate, and under either lytic (bottom graph) or live cell (top graph) conditions.

[0049] FIG. 34 shows a comparison of luminescence and substrate specificity of various NLpoly mutants with NLpep79 using either furimazine or coelenterazine as a substrate, and under either lytic (bottom graph) or live cell (top graph) conditions.

[0050] FIG. 35 shows graphs of the luminescence of NLpep78-HT (top) and NLpep79-HT (bottom) fusions in the presence of various NLpolys.

[0051] FIG. 36 shows a graph of the luminescence of various NLpolys in the absence of NLpep.

[0052] FIG. 37 shows graphs of the luminescence of NLpep78-HT (top) and NLpep79-HT (bottom) fusions in the presence of various NLpolys with either furimazine or coelenterazine substrates.

[0053] FIG. 38 shows a graph of the luminescence of NLpep78-HT with various NLpolys expressed in CHO and HeLa cells.

[0054] FIG. 39 shows graphs of raw and normalized luminescence from NLpoly fused to firefly luciferase expressed in HEK293, Hela, and CHO cell lysates.

[0055] FIG. 40 shows graphs of raw and normalized luminescence from NLpoly fused to click beetle red luciferase expressed in HEK293, Hela, and CHO cell lysates.

[0056] FIG. 41 shows a graphs of luminescence of complementation in live cells using either NLpoly wild-type or 5P.

[0057] FIG. 42 shows graphs luminescence of cell-free complementation of NLpep78-HT fusion (top) and NLpep79-HT fusion (bottom) with various NLpolys.

[0058] FIG. 43 shows a graph of binding affinities for various combinations of NLpeps and NLpolys expressed in HeLa, HEK293 and CHO cell lysate.

[0059] FIG. 44 shows a graph of binding affinities for various combinations of NLpeps and NLpolys in PBS or NANOGLO buffer.

[0060] FIG. 45 shows a graph of binding affinities for NLpoly 5P with NLpep9 or NLpep53 expressed in HeLa, HEK293 or CHO cell lysate.

[0061] FIG. 46 shows a graph of luminescence of varying amounts of NLpolys in the absence of NLpep.

[0062] FIG. 47 shows a graph of background luminescence of various NLpoly variants.

[0063] FIG. 48 shows a graph of background luminescence of various NLpoly variants.

[0064] FIG. 49 shows a SDS-PAGE gel of total lysate and soluble fraction of several NLpoly variants

[0065] FIG. 50 shows (a) a SDS-PAGE gel of the total lysate and soluble fraction of NLpoly variants and (b) background luminescence of NLpoly variants.

[0066] FIG. 51 shows graphs of the luminescence generated with several NLpoly variants when complemented with 10 nm (right) or 100 nM (left) of NLpep78.

[0067] FIG. 52 shows graphs depicting background luminescence in E. coli lysate of various NLpoly variants.

[0068] FIG. 53 shows graphs depicting luminescence in E. coli lysate of various NLpoly variants complemented with NLpep78.

[0069] FIG. 54 shows graphs depicting luminescence in E. coli lysate of various NLpoly variants complemented with NLpep79.

[0070] FIG. 55 shows a graph of signal to background of various NLPolys complemented NLpoly variants complemented with NLpep78 or NLpep79 and normalized to NLpoly 5P.

[0071] FIG. 56 shows a graph depicting background, luminescence with NLpep79 (right) or NLpep78 (left) and signal-to-noise or various NLpoly variants.

[0072] FIG. 57 shows a SDS-PAGE gel of the total lysate and soluble fraction in various NLpoly 5P variants.

[0073] FIG. 58 shows (A) the amount of total lysate and soluble fraction of NLpoly 5P and NLpoly I107L, (B) luminescence generated by NLpoly 5P or NLpoly I107L without NLpep or with NLpep78 or NLpep79 and (C) the improved signal-to-background of NLpoly I107L over NLpoly 5P.

[0074] FIG. 59 shows graphs of luminescence for various NLpoly variants (A) without complementary peptide, (B) with NLpep78-HT and (C) with NLpep79-HT.

[0075] FIG. 60 shows graphs of luminescence for various NLpoly variants (A) without complementary peptide, (B) with NLpep78-HT and (C) with NLpep79-HT.

[0076] FIG. 61 shows graphs of luminescence for various NLpoly variants (A) without complementary peptide, (B) with NLpep78-HT and (C) with NLpep79-HT.

[0077] FIG. 62 shows graphs of luminescence for various NLpoly variants (A) without complementary peptide, (B) with NLpep78-HT and (C) with NLpep79-HT.

[0078] FIG. 63 shows binding affinity between an elongated NLpoly variant (additional amino acids at the C-terminus) and a shortened NLpep (deleted amino acids at the N-terminus).

[0079] FIG. 64 shows a graph of binding affinity of various NLpoly variants with NLpep78.

[0080] FIG. 65 shows the binding and Vmax of NLpep80 and NLpep87 to 5P expressed in mammalian cells (CHO, HEK293T and HeLa).

[0081] FIG. 66 shows the binding and Vmax of NLpep80 and NLpep87 to NLpoly 5P expressed in E. coli.

[0082] FIG. 67 shows a graph of luminescence of shortened NLpolys with elongated NLpeps.

[0083] FIG. 68 shows graphs of Kd and Vmax of NLpoly 5P in HeLa lysate with various complementary NLpeps.

[0084] FIG. 69 shows a graph of binding affinities for several NLpoly variants with NLpep81.

[0085] FIG. 70 shows a graph of binding affinities for several NLpoly variants with NLpep82.

[0086] FIG. 71 shows a graph of binding affinities for several NLpoly mutants with NLpep78.

[0087] FIG. 72 shows a graph of Michaelis constants for several NLpoly mutants with NLpep78.

[0088] FIG. 73 shows graphs of luminescence from a tertiary complementation of two NLpeps and NLpoly 5P-B9.

[0089] FIG. 74 shows a graph of luminescence of titration of NLpoly 5P with NLpep88-HT.

[0090] FIG. 75 shows images of intracellular localization of various NLpep fusions with HaloTag (HT).

[0091] FIG. 76 shows images of intracellular localization NLpoly(wt) and NLpoly(5P).

[0092] FIG. 77 demonstrates the ability to detect via complementation an NLPep-conjugated protein of interest following separation by SDS-PAGE and transfer to a PVDF membrane.

[0093] FIG. 78 shows a graph of relative luminescent signal from various NLpoly variants compared to NLpoly 5P (in the absence of NLpep).

[0094] FIG. 79 shows a graph of relative luminescent signal over background from various NLpolys compared to NLpoly 5P (in the absence of NLpep).

[0095] FIG. 80 compares the dissociation constants for NLpeps consisting of either 1 or 2 repeat units of NLpep78.

[0096] FIG. 81 shows the affinity between NLpoly 5A2 and NLpep86.

[0097] FIG. 82 shows graphs of the luminescence from NLpoly variants without NLpep, with NLpep78, and NLpep79.

[0098] FIG. 83-90 show the dissociation constants as well as the Vmax values for NLpoly 5A2, 5P, 8S and 11S with 96 variants of NLpeps.

[0099] FIG. 91 shows an image of a protein gel of total lysates and the soluble fraction of the same lysate for NLpoly variants.

[0100] FIG. 92 shows an image of a protein gel of total lysates and the soluble fraction of the same lysate for NLpoly variants as well as a table containing the dissociation constants for the same variants.

[0101] FIG. 93 shows the substrate specificity for NLpoly 5P and 11S with NLpep79 and demonstrates that NLpoly 11S has superior specificity for furimazine than 5P.

[0102] FIG. 94 shows an image of a protein gel that follows the affinity purification of NLpoly 8S through binding NLpep78.

[0103] FIG. 95 contains a table of the association and dissociation rate constants for the binding of NLpoly WT or 11S to NLpepWT, 78 or 79.

[0104] FIG. 96 shows the Km values for various pairs of NLpoly/NLpep.

[0105] FIG. 97 compares the dissociation constant for NLpoly 11S/NLpep79 at sub-saturating and saturating concentrations of furimazine.

[0106] FIG. 98 compares the Km values for NLpoly 5A2 with NLpepWT, 78 and 79.

[0107] FIG. 99 shows the luminescence of NLpolys from various steps in the evolution process in the absence of NLpep.

[0108] FIG. 100 shows the improvement in luminescence from E. coli-derived NLpoly over the course of the evolution process with an overall ˜10⁵ improvement (from NLpolyWT:NLpepWT to NLpoly11S:NLpep80).

[0109] FIG. 101 shows the improvement in luminescence from HeLa-expressed NLpoly over the course of the evolution process with an overall ˜10⁵ improvement (from NLpolyWT:NLpepWT to NLpoly11S:NLpep80).

[0110] FIG. 102 shows the improvement in luminescence from HEK293 cell-expressed NLpoly over the course of the evolution process with an overall ˜10⁴ improvement (from NLpolyWT:NLpepWT to NLpoly11S:NLpep80).

[0111] FIG. 103 shows dissociation constants and demonstrates a ˜10⁴ fold improvement in binding affinity from NLpolyWT:NLpepWT to NLpoly11S:NLpep86.

[0112] FIG. 104 shows an image of a protein gel of total lysates and the soluble fraction of the same lysate for NLpoly variants from various steps of the evolution process.

[0113] FIG. 105 shows luminescence of various NLpolys in the absence of NLpep and in the presence of NLpep78 and NLpep79.

[0114] FIG. 106 shows luminescence of various NLpolys in the absence of NLpep and in the presence of NLpep78 and NLpep79.

[0115] FIG. 107 shows luminescence of various NLpolys in the absence of NLpep and in the presence of NLpep78 and NLpep79.

[0116] FIG. 108 shows a comparison of luminescence generated by cells expressing different combinations of FRB and FKBP fused to NLpoly5P and NLpep80/87 after 15 min treatment with rapamycin or vehicle. Fold induction refers to signal generated in the presence of rapamycin compared to signal generated with vehicle.

[0117] FIG. 109 shows a comparison of luminescence generated by cells expressing different combinations of FRB and FKBP fused to NLpoly5P and NLpep80/87 after 60 min treatment with rapamycin or vehicle.

[0118] FIG. 110 shows a comparison of luminescence generated by cells expressing different combinations of FRB and FKBP fused to NLpoly5P and NLpep80/87 after 120 min treatment with rapamycin or vehicle.

[0119] FIG. 111 shows a comparison of luminescence generated by cells expressing different combinations of FRB and FKBP fused to NLpoly5P and NLpep80/87 after 120 min treatment with rapamycin or vehicle. All 8 possible combinations of FRB and FKBP fused to NLpoly/NLpep were tested and less total DNA was used.

[0120] FIG. 112 shows a comparison of luminescence generated by FRB or FKBP fusions expressed in the absence of binding partner.

[0121] FIG. 113 shows a comparison of luminescence generated by cells transfected with varying amounts of FRB-NLpoly5P and FKBP-NLpep80/87 DNA.

[0122] FIG. 114 shows a comparison of luminescence generated by cells transfected with varying amounts of FRB-NLpoly5P or FKBP-NLpep80/87 DNA in the absence of binding partner.

[0123] FIG. 115 shows a comparison of luminescence generated by cells transfected with varying amounts of FRB-NLpoly5P and FKBP-NLpep80/87 DNA. This example differs from FIG. 113 in that lower levels of DNA were used.

[0124] FIG. 116 shows a comparison of luminescence generated by cells transfected with varying amounts of FRB-NLpoly5P or FKBP-NLpep80/87 DNA in the absence of binding partner. This differs from FIG. 114 in that lower levels of DNA were used.

[0125] FIG. 117 shows a comparison of luminescence generated by cells transfected with varying amounts of FRB-NLpoly5P and FKBP-NLpep80 DNA after treatment with rapamycin for different lengths of time.

[0126] FIG. 118 shows a comparison of luminescence generated by cells transfected with varying amounts of FRB-NLpoly5P and FKBP-NLpep87 DNA after treatment with rapamycin for different lengths of time.

[0127] FIG. 119 shows a comparison of luminescence generated by cells expressing different combinations of FRB-NLpoly5P with FKBP-NLpep80/87/95/96/97. Assay was performed in both a two-day and three-day format.

[0128] FIG. 120 shows a comparison of luminescence generated by cells expressing different combinations of FRB-NLpoly5A2 with FKBP-NLpep80/87/95/96/97. Assay was performed in both a two-day and three-day format.

[0129] FIG. 121 shows a comparison of luminescence generated by cells expressing different combinations of FRB-NLpoly5A2 or FRB-NLpoly11S with FKBP-NLpep101/104/105/106/107/108/109/110.

[0130] FIG. 122 shows a comparison of luminescence generated by cells transfected with different combinations of FRB-NLpoly5A2 or FRB-NLpoly11S with FKBP-NLpep87/96/98/99/100/101/102/103.

[0131] FIG. 123 shows a comparison of luminescence generated by cells transfected with different levels of FRB-NLpoly11S and FKBP-NLpep87/101/102/107 DNA.

[0132] FIG. 124 shows a comparison of luminescence generated by cells transfected with different levels of FRB-NLpoly5A2 and FKBP-NLpep87/101/102/107 DNA.

[0133] FIG. 125 shows a rapamycin dose response curve showing luminescence of cells expressing FRB-NLpoly5P and FKBP-NLpep80/87 DNA.

[0134] FIG. 126 shows a rapamycin dose response curve showing luminescence of cells expressing FRB-NLpoly5A2 or FRB-NLply11S and FKBP-NLpep87/101 DNA.

[0135] FIG. 127 shows a comparison of luminescence generated by cells expressing FRB-11S and FKBP-101 and treated with substrate PBI-4377 or furimazine.

[0136] FIG. 128 shows a rapamycin time course of cells expressing FRB-NLpoly11S/5A2 and FKBP-NLpep87/101 conducted in the presence or absence of rapamycin wherein the rapamycin was added manually.

[0137] FIG. 129 shows a rapamycin time course of cells expressing FRB-NLpoly11S/5A2 and FKBP-NLpep87/101 conducted in the presence or absence of rapamycin wherein the rapamycin was added via instrument injector.

[0138] FIG. 130 shows luminescence generated by FRB-NLpoly11S and FKBP-NLpep101 as measured on two different luminescence-reading instruments.

[0139] FIG. 131 provides images showing luminescence of cells expressing FRB-NLpoly11S and FKBP-NLpep101 at various times after treatment with rapamycin.

[0140] FIG. 132 provides a graph showing Image J quantitation of the signal generated by individual cells expressing FRB-NLpoly11S and FKBP-NLpep101 at various times after treatment with rapamycin.

[0141] FIG. 133 shows a comparison of luminescence in different cell lines expressing FRB-NLpoly11S and FKBP-NLpep101.

[0142] FIG. 134 shows a comparison of luminescence generated by cells expressing FRB-NLpoly11S and FKBP-NLpep101 after treatment with the rapamycin competitive inhibitor FK506.

[0143] FIG. 135 shows (left side) luminescence generated by cells expressing FRB-NLpoly11S and FKBP-NLpep101 after treatment with the rapamycin competitive inhibitor FK506, and (right side) the percent of luminescence remaining after treatment with FK506.

[0144] FIG. 136 shows luminescence generated by cells transfected with different combinations of V2R-NLpoly5A2 or V2R-NLpoly11S with NLpep87/101-ARRB2 in the presence or absence of the V2R agonist AVP.

[0145] FIG. 137 shows an AVP treatment time course showing luminescence generated by cells transfected with V2R-NLpoly11S and NLpep87/101-ARRB2 after treatment with AVP wherein AVP was added manually.

[0146] FIG. 138 shows an AVP treatment time course showing luminescence generated by cells transfected with different combinations of V2R-NLpoly5A2 or V2R-NLpoly11S with NLpep87/101-ARRB2 after treatment with AVP wherein AVP was added via instrument injector.

[0147] FIG. 139 shows an AVP treatment time course at 37° C. showing luminescence generated by cells expressing different configurations of V2R and ARRB2 fused to NLpoly11S and NLpep 101 after treatment with AVP.

[0148] FIG. 140 shows a comparison of luminescence in different cell lines expressing V2R-NLpep11S and NLpep101-ARRB2.

[0149] FIG. 141 shows 60× images showing luminescence of cells expressing V2R-NLpoly11S and NLpep101-ARRB2 at various times after treatment with AVP.

[0150] FIG. 142 shows 150× images showing luminescence of cells expressing V2R-NLpoly11S and NLpep101-ARRB2 at various times after treatment with AVP.

[0151] FIG. 143 shows a protein gel of total lysates and the soluble fraction of the same lysate for NLpoly variants.

[0152] FIG. 144 shows the dissociation constants for NLpoly 5P and combinations of mutations at positions 31, 46, 75, 76, and 93 in NLpoly 5P.

[0153] FIG. 145 shows a transferase example of post translational modification enzyme activity detection using an NLpep and aminopeptidase.

[0154] FIG. 146 shows a hydrolase example of post translational modification enzyme activity detection using an NLpep and methyl-specific antibody.

[0155] FIG. 147 contains wavelength scans for NLpoly WT complemented with either NLpepWT or NLpepWT conjugated to TMR.

[0156] FIG. 148 contains wavelength scans for NanoLuc fused to HaloTag (NL-HT) and NLpoly 5A2 complemented with NLPepWT with 4 additional amino acids (DEVD) and conjugated to Non-chloroTOM (NCT).

[0157] FIG. 149 shows a schematic a tertiary interaction wherein the energy transfer with an NLpoly and NLpep can also be used to measure three molecules interacting. In the schematic, a GPCR labeled with an NLpoly and a GPCR interacting protein labeled with a NLpep form a bioluminescent complex when they interact. This allows measurement of the binary interaction. If a small molecule GPCR ligand bearing an appropriate fluorescent moiety for energy transfer interacts with this system, energy transfer will occur. Therefore, the binary protein-protein interaction and the ternary drug-protein-protein interaction can be measured in the same experiment.

### DEFINITIONS

[0158] As used herein, the term “substantially” means that the recited characteristic, parameter, and/or value need not be achieved exactly, but that deviations or variations, including for example, tolerances, measurement error, measurement accuracy limitations and other factors known to skill in the art, may occur in amounts that do not preclude the effect the characteristic was intended to provide. A characteristic or feature that is substantially absent (e.g., substantially non-luminescent) may be one that is within the noise, beneath background, or below the detection capabilities of the assay being used.

[0159] As used herein, the term “bioluminescence” refers to production and emission of light by a chemical reaction catalyzed by, or enabled by, an enzyme, protein, protein complex, or other biomolecule (e.g., bioluminescent complex). In typical embodiments, a substrate for a bioluminescent entity (e.g., bioluminescent protein or bioluminescent complex) is converted into an unstable form by the bioluminescent entity; the substrate subsequently emits light as it returns to its more stable form.

[0160] As used herein the term “complementary” refers to the characteristic of two or more structural elements (e.g., peptide, polypeptide, nucleic acid, small molecule, etc.) of being able to hybridize, dimerize, or otherwise form a stable complex with each other. For example, a “complementary peptide and polypeptide” are capable of coming together to form a stable complex. Complementary elements may require assistance to form a stable complex (e.g., from interaction elements), for example, to place the elements in the proper conformation for complementarity, to co-localize complementary elements, to lower interaction energy for complementary, etc.

[0161] As used herein, the term “complex” refers to an assemblage or aggregate of molecules (e.g., peptides, polypeptides, etc.) in direct and/or indirect contact with one another. In one aspect, “contact,” or more particularly, “direct contact” means two or more molecules are close enough so that attractive noncovalent interactions, such as Van der Waal forces, hydrogen bonding, ionic and hydrophobic interactions, and the like, dominate the interaction of the molecules. In such an aspect, a complex of molecules (e.g., a peptide and polypeptide) is stable under assay conditions such that the complex is thermodynamically more favorable than a non-aggregated, or non-complexed, state of its component molecules. As used herein the term “complex,” unless described as otherwise, refers to the assemblage of two or more molecules (e.g., peptides, polypeptides or a combination thereof).

[0162] As used herein, the term “non-luminescent” refers to an entity (e.g., peptide, polypeptide, complex, protein, etc.) that exhibits the characteristic of not emitting energy as light in the visible spectrum (e.g., in the presence or absence of a substrate). An entity may be referred to as non-luminescent if it does not exhibit detectable luminescence in a given assay. As used herein, the term “non-luminescent” is synonymous with the term “substantially non-luminescent.” An entity is “non-luminescent” if any light emission is sufficiently minimal so as not to create interfering background for a particular assay.

[0163] As used herein, the terms “non-luminescent peptide” (NLpep) and “non-luminescent polypeptide” (NLpoly) refer to peptides and polypeptides that exhibit substantially no luminescence (e.g., in the presence or absence of a substrate), or an amount that is virtually undetectable (e.g., beneath the noise) under standard conditions (e.g., physiological conditions, assay conditions, etc.) and with typical instrumentation (e.g., luminometer, etc.). In some embodiments, such non-luminescent peptides and polypeptides assemble, according to the criteria described herein, to form a bioluminescent complex. As used herein, a “non-luminescent element” is a non-luminescent peptide or non-luminescent polypeptide. The term “bioluminescent complex” refers to the assembled complex of two or more non-luminescent peptides and/or non-luminescent polypeptides. The bioluminescent complex catalyzes or enables the conversion of a substrate for the bioluminescent complex into an unstable form; the substrate subsequently emits light as it returns to its more stable form. When uncomplexed, two non-luminescent elements that form a bioluminescent complex may be referred to as a “non-luminescent pair.” If a bioluminescent complex is formed by three or more non-luminescent peptides and/or non-luminescent polypeptides, the uncomplexed constituents of the bioluminescent complex may be referred to as a “non-luminescent group.”

[0164] As used herein, the term “interaction element” refers to a moiety that assists in bringing together a pair of non-luminescent elements or a non-luminescent group to form a bioluminescent complex. In a typical embodiment, a pair of interaction elements (a.k.a. “interaction pair”) is attached to a pair of non-luminescent elements (e.g., non-luminescent peptide/polypeptide pair), and the attractive interaction between the two interaction elements facilitates formation of the bioluminescent complex; although the present invention is not limited to such a mechanism, and an understanding of the mechanism is not required to practice the invention. Interaction elements may facilitate formation of the bioluminescent complex by any suitable mechanism (e.g., bringing non-luminescent pair/group into close proximity, placing a non-luminescent pair/group in proper conformation for stable interaction, reducing activation energy for complex formation, combinations thereof, etc.). An interaction element may be a protein, polypeptide, peptide, small molecule, cofactor, nucleic acid, lipid, carbohydrate, antibody, etc. An interaction pair may be made of two of the same interaction elements (i.e. homopair) or two different interaction elements (i.e. heteropair). In the case of a heteropair, the interaction elements may be the same type of moiety (e.g., polypeptides) or may be two different types of moieties (e.g., polypeptide and small molecule). In some embodiments, in which complex formation by the interaction pair is studied, an interaction pair may be referred to as a “target pair” or a “pair of interest,” and the individual interaction elements are referred to as “target elements” (e.g., “target peptide,” “target polypeptide,” etc.) or “elements of interest” (e.g., “peptide of interest,” “polypeptide or interest,” etc.).

[0165] As used herein, the term “preexisting protein” refers to an amino acid sequence that was in physical existence prior to a certain event or date. A “peptide that is not a fragment of a preexisting protein” is a short amino acid chain that is not a fragment or sub-sequence of a protein (e.g., synthetic or naturally-occurring) that was in physical existence prior to the design and/or synthesis of the peptide.

[0166] As used herein, the term “fragment” refers to a peptide or polypeptide that results from dissection or “fragmentation” of a larger whole entity (e.g., protein, polypeptide, enzyme, etc.), or a peptide or polypeptide prepared to have the same sequence as such. Therefore, a fragment is a subsequence of the whole entity (e.g., protein, polypeptide, enzyme, etc.) from which it is made and/or designed. A peptide or polypeptide that is not a subsequence of a preexisting whole protein is not a fragment (e.g., not a fragment of a preexisting protein). A peptide or polypeptide that is “not a fragment of a preexisting bioluminescent protein” is an amino acid chain that is not a subsequence of a protein (e.g., natural of synthetic) that: (1) was in physical existence prior to design and/or synthesis of the peptide or polypeptide, and (2) exhibits substantial bioluminescent activity.

[0167] As used herein, the term “subsequence” refers to peptide or polypeptide that has 100% sequence identify with another, larger peptide or polypeptide. The subsequence is a perfect sequence match for a portion of the larger amino acid chain.

[0168] As used herein, the term “sequence identity” refers to the degree two polymer sequences (e.g., peptide, polypeptide, nucleic acid, etc.) have the same sequential composition of monomer subunits. The term “sequence similarity” refers to the degree with which two polymer sequences (e.g., peptide, polypeptide, nucleic acid, etc.) have similar polymer sequences. For example, similar amino acids are those that share the same biophysical characteristics and can be grouped into the families, e.g., acidic (e.g., aspartate, glutamate), basic (e.g., lysine, arginine, histidine), non-polar (e.g., alanine, valine, leucine, isoleucine, proline, phenylalanine, methionine, tryptophan) and uncharged polar (e.g., glycine, asparagine, glutamine, cysteine, serine, threonine, tyrosine). The “percent sequence identity” (or “percent sequence similarity”) is calculated by: (1) comparing two optimally aligned sequences over a window of comparison (e.g., the length of the longer sequence, the length of the shorter sequence, a specified window), (2) determining the number of positions containing identical (or similar) monomers (e.g., same amino acids occurs in both sequences, similar amino acid occurs in both sequences) to yield the number of matched positions, (3) dividing the number of matched positions by the total number of positions in the comparison window (e.g., the length of the longer sequence, the length of the shorter sequence, a specified window), and (4) multiplying the result by 100 to yield the percent sequence identity or percent sequence similarity. For example, if peptides A and B are both 20 amino acids in length and have identical amino acids at all but 1 position, then peptide A and peptide B have 95% sequence identity. If the amino acids at the non-identical position shared the same biophysical characteristics (e.g., both were acidic), then peptide A and peptide B would have 100% sequence similarity. As another example, if peptide C is 20 amino acids in length and peptide D is 15 amino acids in length, and 14 out of 15 amino acids in peptide D are identical to those of a portion of peptide C, then peptides C and D have 70% sequence identity, but peptide D has 93.3% sequence identity to an optimal comparison window of peptide C. For the purpose of calculating “percent sequence identity” (or “percent sequence similarity”) herein, any gaps in aligned sequences are treated as mismatches at that position.

[0169] As used herein, the term “physiological conditions” encompasses any conditions compatible with living cells, e.g., predominantly aqueous conditions of a temperature, pH, salinity, chemical makeup, etc. that are compatible with living cells.

[0170] As used herein, the term “sample” is used in its broadest sense. In one sense, it is meant to include a specimen or culture obtained from any source, as well as biological and environmental samples. Biological samples may be obtained from animals (including humans) and encompass fluids, solids, tissues, and gases. Biological samples include blood products, such as plasma, serum and the like. Sample may also refer to cell lysates or purified forms of the peptides and/or polypeptides described herein. Cell lysates may include cells that have been lysed with a lysing agent or lysates such as rabbit reticulocyte or wheat germ lysates. Sample may also include cell-free expression systems. Environmental samples include environmental material such as surface matter, soil, water, crystals and industrial samples. Such examples are not however to be construed as limiting the sample types applicable to the present invention.

[0171] As used herein, unless otherwise specified, the terms “peptide” and “polypeptide” refer to polymer compounds of two or more amino acids joined through the main chain by peptide amide bonds (—C(O)NH—). The term “peptide” typically refers to short amino acid polymers (e.g., chains having fewer than 25 amino acids), whereas the term “polypeptide” typically refers to longer amino acid polymers (e.g., chains having more than 25 amino acids).

### DETAILED DESCRIPTION

[0172] The study of protein interactions, particularly under physiological conditions and/or at physiologic expression levels, requires high sensitivity. In particular embodiments described herein, protein interactions with small molecules, nucleic acids, other proteins, etc. are detected based on the association of two non-luminescent elements that come together to from a bioluminescent complex capable of producing a detectable signal (e.g., luminescence). The formation of the bioluminescent complex is dependent upon the protein interaction that is being monitored.

[0173] Provided herein are compositions and methods for the assembly of a bioluminescent complex from two or more non-luminescent peptide and/or polypeptide units (e.g., non-luminescent pair). In some embodiments, the non-luminescent peptide and/or polypeptide units are not fragments of a preexisting protein (e.g., are not complementary subsequences of a known polypeptide sequence). In particular, bioluminescent activity is conferred upon a non-luminescent polypeptide via structural complementation with a non-luminescent peptide.

[0174] In some embodiments, provided herein are non-luminescent pairs for use in detecting and monitoring molecular interactions (e.g., protein-protein, protein-DNA, protein-RNA interactions, RNA-DNA, protein-small molecule, RNA-small-molecule, etc.). Also provided herein are complementary panels of interchangeable non-luminescent elements (e.g., peptides and polypeptides) that have variable affinities and luminescence upon formation of the various bioluminescent complexes (e.g., a high-affinity/high-luminescence pair, a moderate-affinity/high-luminescence pair, a low-affinity/moderate-luminescence pair, etc.). Utilizing different combinations of non-luminescent elements provides an adaptable system comprising various pairs ranging from lower to higher affinities, luminescence and other variable characteristics. This adaptability allows the detection/monitoring of molecular interactions to be fine-tuned to the specific molecule(s) of interest and expands the range of molecular interactions that can be monitored to include interactions with very high or low affinities. Further provided herein are methods by which non-luminescent pairs (or groups) and panels of non-luminescent pairs (or groups) are developed and tested.

[0175] In some embodiments, the interaction between the peptide/polypeptide members of the non-luminescent pair alone is insufficient to form the bioluminescent complex and produce the resulting bioluminescent signal. However, if an interaction element is attached to each peptide/polypeptide member of the non-luminescent pair, then the interactions of the interaction pair (e.g., to form an interaction complex) facilitate formation of the bioluminescent complex. In such embodiments, the bioluminescent signal from the bioluminescent complex (or the capacity to produce such a signal in the presence of substrate) serves as a reporter for the formation of the interaction complex. If an interaction complex is formed, then a bioluminescent complex is formed, and a bioluminescent signal is detected/measured/monitored (e.g., in the presence of substrate). If an interaction complex fails to form (e.g., due to unfavorable conditions, due to unstable interaction between the interaction elements, due to incompatible interaction elements), then a stable bioluminescent complex does not form, and a bioluminescent signal is not produced.

[0176] In certain embodiments, the interaction pair comprises two molecules of interest (e.g., proteins of interest). For example, assays can be performed to detect the interaction of two molecules of interest by tethering each one to a separate member of a non-luminescent pair. If the molecules of interest interact (e.g., transiently interact, stably interact, etc.), the non-luminescent pair is brought into close proximity in a suitable conformation and a bioluminescent complex is formed (and bioluminescent signal is produced/detected (in the presence of substrate)). In the absence of an interaction between the molecules of interest (e.g., no complex formation, not even transient interaction, etc.), the non-luminescent pair does not interact in a stable enough manner, and a bioluminescent signal is not produced or only weakly produced. Such embodiments can be used to study the effect of inhibitors on complex formation, the effect of mutations on complex formation, the effect of conditions (e.g., temperature, pH, etc.) on complex formation, the interaction of a small molecule (e.g., potential therapeutic) with a target molecule, etc.

[0177] Different non-luminescent pairs may require different strength, duration and/or stability of the interaction complex to result in bioluminescent complex formation. In some embodiments, a stable interaction complex is required to produce a detectable bioluminescent signal. In other embodiments, even a weak or transient interaction complex results in bioluminescent complex formation. In some embodiments, the strength of an interaction complex is directly proportional to the strength of the resulting bioluminescent signal. Some non-luminescent pairs produce a detectable signal when combined with an interaction complex with a high millimolar dissociation constant (e.g., K_{d}>100 mM). Other non-luminescent pairs require an interaction pair with a low millimolar (e.g., K_{d}<100 mM), micromolar (e.g., K_{d}<1 mM), nanomolar (e.g., K_{d}<1 μM), or even picomolar (e.g., K_{d}<1 nM) dissociation constant in order to produce a bioluminescent complex with a detectable signal.

[0178] In some embodiments, one or more of the non-luminescent peptides/polypeptides are not fragments of a pre-existing protein. In some embodiments, one or more of the non-luminescent peptides/polypeptides are not fragments of a pre-existing bioluminescent protein. In some embodiments, neither/none of the non-luminescent peptides/polypeptides are fragments of a pre-existing protein. In some embodiments, neither/none of the non-luminescent peptides/polypeptides are fragments of a pre-existing bioluminescent protein. In some embodiments, neither the non-luminescent peptide nor non-luminescent polypeptide that assemble together to form a bioluminescent complex are fragments of a pre-existing protein. In some embodiments, a non-luminescent element for use in embodiments of the present invention is not a subsequence of a preexisting protein. In some embodiments, a non-luminescent pair for use in embodiments described herein does not comprise complementary subsequences of a preexisting protein.

[0179] In some embodiments, non-luminescent peptides/polypeptides are substantially non-luminescent in isolation. In certain embodiments, when placed in suitable conditions (e.g., physiological conditions), non-luminescent peptides/polypeptides interact to form a bioluminescent complex and produce a bioluminescent signal in the presence of substrate. In other embodiments, without the addition of one or more interaction elements (e.g., complementary interaction elements attached to the component non-luminescent peptide and non-luminescent polypeptide), non-luminescent peptides/polypeptides are unable to form a bioluminescent complex or only weakly form a complex. In such embodiments, non-luminescent peptides/polypeptides are substantially non-luminescent in each other's presence alone, but produce significant detectable luminescence when aggregated, associated, oriented, or otherwise brought together by interaction elements. In some embodiments, without the addition of one or more interaction elements (e.g., complementary interaction elements attached to the component peptide and polypeptide), peptides and/or polypeptides that assemble into the bioluminescent complex produce a low level of luminescence in each other's presence, but undergo a significant increase in detectable luminescence when aggregated, associated, oriented, or otherwise brought together by interaction elements.

[0180] In some embodiments, compositions and methods described herein comprise one or more interaction elements. In a typical embodiment, an interaction element is a moiety (e.g., peptide, polypeptide, protein, small molecule, nucleic acid, lipid, carbohydrate, etc.) that is attached to a peptide and/or polypeptide to assemble into the bioluminescent complex. The interaction element facilitates the formation of a bioluminescent complex by any suitable mechanism, including: interacting with one or both non-luminescent elements, inducing a conformational change in a non-luminescent element, interacting with another interaction element (e.g., an interaction element attached to the other non-luminescent element), bringing non-luminescent elements into close proximity, orienting non-luminescent elements for proper interaction, etc.

[0181] In some embodiments, one or more interaction elements are added to a solution containing the non-luminescent elements, but are not attached to the non-luminescent elements. In such embodiments, the interaction element(s) interact with the non-luminescent elements to induce formation of the bioluminescent complex or create conditions suitable for formation of the bioluminescent complex. In other embodiments, a single interaction element is attached to one member of a non-luminescent pair. In such embodiments, the lone interaction element interacts with one or both of the non-luminescent elements to create favorable interactions for formation of the bioluminescent complex. In typical embodiments of the present invention, one interaction element is attached to each member of a non-luminescent pair. Favorable interactions between the interaction elements facilitate interactions between the non-luminescent elements. The interaction pair may stably interact, transiently interact, form a complex, etc. The interaction of the interaction pair facilitates interaction of the non-luminescent elements (and formation of a bioluminescent complex) by any suitable mechanism, including, but not limited to: bringing the non-luminescent pair members into close proximity, properly orienting the non-luminescent pair members from interaction, reducing non-covalent forces acting against non-luminescent pair interaction, etc.

[0182] In some embodiments, an interaction pair comprises any two chemical moieties that facilitate interaction of an associated non-luminescent pair. An interaction pair may consist of, for example: two complementary nucleic acids, two polypeptides capable of dimerization (e.g., homodimer, heterodimer, etc.), a protein and ligand, protein and small molecule, an antibody and epitope, a reactive pair of small molecules, etc. Any suitable pair of interacting molecules may find use as an interaction pair.

[0183] In some embodiments, an interaction pair comprises two molecules of interest (e.g., proteins of interest) or target molecules. In some embodiments, compositions and methods herein provide useful assays (e.g., in vitro, in vivo, in situ, whole animal, etc.) for studying the interactions between a pair of target molecules.

[0184] In certain embodiments, a pair off interaction elements, each attached to one of the non-luminescent elements, interact with each other and thereby facilitate formation of the bioluminescent complex. In some embodiments, the present of a ligand, substrate, co-factor or addition interaction element (e.g., not attached to non-luminescent element) is necessary to induce the interaction between the interaction elements and facilitate bioluminescent complex formation. In some embodiments, detecting a signal from the bioluminescent complex indicates the presence of the ligand, substrate, co-factor or addition interaction element or conditions that allow for interaction with the interaction elements.

[0185] In some embodiments, a pair off interaction elements, and a pair of non-luminescent elements are all present in a single amino acid chain (e.g., (interaction element 1)-NLpep-(interaction element 2)-NLpoly, NLpoly-(interaction element 1)-NLpep-(interaction element 2), NLpoly-(interaction element 1)-(interaction element 2)-NLpep, etc.). In some embodiments in which a pair off interaction elements, and a pair of non-luminescent elements are all present in a single amino acid chain, a ligand, substrate, co-factor or addition interaction element is required for the interaction pair to form an interaction complex and facilitate formation of the bioluminescent complex.

[0186] In certain embodiments, an interaction element and a non-luminescent element are attached, fused, linked, connected, etc. In typical embodiments, a first non-luminescent element and a first interaction element are attached to each other, and a second non-luminescent element and a second interaction element are attached to each other. Attachment of signal and interaction elements may be achieved by any suitable mechanism, chemistry, linker, etc. The interaction and non-luminescent elements are typically attached through covalent connection, but non-covalent linking of the two elements is also provided. In some embodiments, the signal and interaction elements are directly connected and, in other embodiments, they are connected by a linker.

[0187] In some embodiments, in which the interaction element is a peptide or polypeptide, the signal and interaction elements are contained within a single amino acid chain. In some embodiments, a single amino acid chain comprises, consists of, or consists essentially of a non-luminescent element and interaction element. In some embodiments, a single amino acid chain comprises, consists of, or consists essentially of a non-luminescent element, an interaction element, and optionally one or more an N-terminal sequence, a C-terminal sequence, regulatory elements (e.g., promoter, translational start site, etc.), and a linker sequence. In some embodiments, the signal and interaction elements are contained within a fusion polypeptide. The signal and interaction elements (and any other amino acid segments to be included in the fusion) may be expressed separately; however, in other embodiments, a fusion protein is expressed that comprises or consist of both the interaction and signal sequences.

[0188] In some embodiments, a first fusion protein comprising a first non-luminescent element and first interaction element as well as a second fusion protein comprising a second non-luminescent element and second interaction element are expressed within the same cells. In such embodiments, the first and second fusion proteins are purified and/or isolated from the cells, or the interaction of the fusion proteins is assayed within the cells. In other embodiments, first and second fusion proteins are expressed in separate cells and combined (e.g., following purification and/or isolation) for signal detection. In some embodiments, one or more fusion proteins are expressed in cell lysate (e.g., rabbit reticulocyte lysate) or in a cell-free system.

[0189] In certain embodiments, nucleic acids, DNA, RNA, vectors, etc. are provided that encode peptide, polypeptides, fusion polypeptide, fusion proteins, etc. of the present invention. Such nucleic acids and vectors may be used for expression, transformation, transfection, injection, etc.

[0190] In some embodiments, a non-luminescent element and interaction element are connected by a linker. In some embodiments, a linker connects the signal and interaction elements while providing a desired amount of space/distance between the elements. In some embodiments, a linker allows both the signal and interaction elements to form their respective pairs (e.g., non-luminescent pair and interaction pair) simultaneously. In some embodiments, a linker assists the interaction element in facilitating the formation of a non-luminescent pair interaction. In some embodiments, when an interaction pair is formed, the linkers that connect each non-luminescent element to their respective interaction elements position the non-luminescent elements at the proper distance and conformation to form a bioluminescent complex. In some embodiments, an interaction element and non-luminescent element are held in close proximity (e.g., <4 monomer units) by a linker. In some embodiments, a linker provides a desired amount of distance (e.g., 1, 2, 3, 4, 5, 6 . . . 10 . . . 20, or more monomer units) between signal and interaction elements (e.g., to prevent undesirable interactions between signal and interaction elements, for steric considerations, to allow proper orientation of non-luminescent element upon formation of interaction complex, to allow propagation of a complex-formation from interaction complex to non-luminescent elements, etc.). In certain embodiments, a linker provides appropriate attachment chemistry between the signal and interaction elements. A linker may also improve the synthetic process of making the signal and interaction element (e.g., allowing them to be synthesized as a single unit, allowing post synthesis connection of the two elements, etc.).

[0191] In some embodiments, a linker is any suitable chemical moiety capable of linking, connecting, or tethering a non-luminescent element to an interaction element. In some embodiments, a linker is a polymer of one or more repeating or non-repeating monomer units (e.g., nucleic acid, amino acid, carbon-containing polymer, carbon chain, etc.). When a non-luminescent element and interaction element are part of a fusion protein, a linker (when present) is typically an amino acid chain. When a non-luminescent element and interaction element are tethered together after the expression of the individual elements, a linker may comprise any chemical moiety with functional (or reactive) groups at either end that are reactive with functional groups on the signal and interaction elements, respectively. Any suitable moiety capable of tethering the signal and interaction elements may find use as a linker.

[0192] A wide variety of linkers may be used. In some embodiments, the linker is a single covalent bond. In some embodiments, the linker comprises a linear or branched, cyclic or heterocyclic, saturated or unsaturated, structure having 1-20 nonhydrogen atoms (e.g., C, N, P, O and S) and is composed of any combination of alkyl, ether, thioether, imine, carboxylic, amine, ester, carboxamide, sulfonamide, hydrazide bonds and aromatic or heteroaromatic bonds. In some embodiments, linkers are longer than 20 nonhydrogen atoms (e.g. 21 non-hydrogen atoms, 25 non-hydrogen atoms, 30 non-hydrogen atoms, 40 non-hydrogen atoms, 50 non-hydrogen atoms, 100 non-hydrogen atoms, etc.) In some embodiments, the linker comprises 1-50 non-hydrogen atoms (in addition to hydrogen atoms) selected from the group of C, N, P, O and S (e.g. 1, 2, 3, 4, 5, 6, 7, 8, 9, 10, 11, 12, 13, 14, 15, 16, 17, 18, 19, 20, 21, 22, 23, 24, 25, 26, 27, 28, 29, 30, 31, 32, 33, 34, 35, 36, 37, 38, 39, 40, 41, 42, 43, 44, 45, 46, 47, 48, 49, or 50 non-hydrogen atoms).

[0193] The present invention is not limited by the types of linkers available. The signal and interaction elements are linked, either directly (e.g. linker consists of a single covalent bond) or linked via a suitable linker. The present invention is not limited to any particular linker group. A variety of linker groups are contemplated, and suitable linkers could comprise, but are not limited to, alkyl groups, methylene carbon chains, ether, polyether, alkyl amide linker, a peptide linker, a modified peptide linker, a Poly(ethylene glycol) (PEG) linker, a streptavidin-biotin or avidin-biotin linker, polyaminoacids (e.g. polylysine), functionalised PEG, polysaccharides, glycosaminoglycans, dendritic polymers (WO93/06868 and by Tomalia et al. in Angew. Chem. Int. Ed. Engl. 29:138-175 (1990), herein incorporated by reference in their entireties), PEG-chelant polymers (W94/08629, WO94/09056 and WO96/26754, herein incorporated by reference in their entireties), oligonucleotide linker, phospholipid derivatives, alkenyl chains, alkynyl chains, disulfide, or a combination thereof. In some embodiments, the linker is cleavable (e.g., enzymatically (e.g., TEV protease site), chemically, photoinduced, etc.

[0194] In some embodiments, substantially non-luminescent peptides and polypeptides are provided with less than 100% sequence identity and/or similarity to any portion of an existing luciferase (e.g., a firefly luciferase, a Renilla luciferase, an Oplophorus luciferase, enhanced Oplophorus luciferases as described in U.S. Pat. App. 2010/0281552 and U.S. Pat. App. 2012/0174242, herein incorporated by reference in their entireties). Certain embodiments of the present invention involve the formation of bioluminescent complexes of non-luminescent peptides and polypeptides with less than 100%, but more than 40% (e.g., >40%, >45%, >50%, >55%, >60%, >65%, >70%, >75%, >80%, >85%, >90%, >95%, >98%, >99%) sequence identity with all or a portion (e.g., 8 or more amino acids, less than about 25 amino acids for peptides) of SEQ ID NO: 2157 (e.g., complete NANOLUC sequence). In some embodiments, non-luminescent peptides and polypeptides are provided with less than 100%, but more than 40% (e.g., >40%, >45%, >50%, >55%, >60%, >65%, >70%, >75%, >80%, >85%, >90%, >95%, >98%, >99%) sequence similarity with a portion (e.g., 8 or more amino acids, less than about 25 amino acids for peptides) of SEQ ID NO: 2157 (e.g., peptides and polypeptides that interact to form bioluminescent complexes). Non-luminescent peptides are provided that have less than 100%, but more than 40% (e.g., >40%, >45%, >50%, >55%, >60%, >65%, >70%, >75%, >80%, >85%, >90%, >95%, >98%, >99%) sequence identity and/or similarity with about a 25 amino acid or less portion of SEQ ID NO: 2157, wherein such peptides form a bioluminescent complex when combined under appropriate conditions (e.g., stabilized by an interaction pair) with a polypeptide having less than 100%, but more than 40% (e.g., >40%, >45%, >50%, >55%, >60%, >65%, >70%, >75%, >80%, >85%, >90%, >95%, >98%, >99%) sequence identity and/or similarity with another portion SEQ ID NO: 2157. Similarly, non-luminescent polypeptides are provided that have less than 100%, but more than 40% (e.g., >40%, >45%, >50%, >55%, >60%, >65%, >70%, >75%, >80%, >85%, >90%, >95%, >98%, >99%) sequence identity or similarity with a portion of SEQ ID NO: 2157, wherein such polypeptides form a bioluminescent complex when combined under appropriate conditions (e.g., stabilized by an interaction pair) with a peptide having less than 100%, but more than 40% (e.g., >40%, >45%, >50%, >55%, >60%, >65%, >70%, >75%, >80%, >85%, >90%, >95%, >98%, >99%) sequence identity and/or similarity with another portion SEQ ID NO: 2157. In some embodiments, non-luminescent peptides with less than 100%, but more than 40% (e.g., >40%, >45%, >50%, >55%, >60%, >65%, >70%, >75%, >80%, >85%, >90%, >95%, >98%, >99%) sequence identity or similarity with SEQ ID NO: 2 are provided. In some embodiments, non-luminescent polypeptides with less than 100%, but more than 40% (e.g., >40%, >45%, >50%, >55%, >60%, >65%, >70%, >75%, >80%, >85%, >90%, >95%, >98%, >99%) sequence identity or similarity with SEQ ID NO: 440 are provided.

[0195] In some embodiments, non-luminescent peptides that find use in embodiments of the present invention include peptides with one or more amino acid substitutions, deletions, or additions from GVTGWRLCKRISA (SEQ ID NO: 236). In some embodiments, the present invention provides peptides comprising one or more of amino acid sequences of Table 1, and/or nucleic acids comprising the nucleic acid sequences of Table 1 (which code for the peptide sequences of Table 1).

TABLE 1
Peptide sequences

| SEQ | | | |
|---|---|---|---|
| ID | | | |
| NO. | PEPTIDE NO. | POLYMER | SEQUENCE |
| 3 | NLpep2 (w/ Met) | N.A. | ATGGACGTGACCGGCTGGCGGCTGTGCGAACGCATTCTGGCG |
| 4 | NLpep2 (w/ Met) | A.A. | MDVTGWRLCERILA |
| 5 | NLpep3 (w/ Met) | N.A. | ATGGGAGTGACCGCCTGGCGGCTGTGCGAACGCATTCTGGCG |
| 6 | NLpep3 (w/ Met) | A.A. | MGVTAWRLCERILA |
| 7 | NLpep4 (w/ Met) | N.A. | ATGGGAGTGACCGGCTGGCGGCTGTGCAAGCGCATTCTGGCG |
| 8 | NLpep4 (w/ Met) | A.A. | MGVTGWRLCKRILA |
| 9 | NLpep5 (w/ Met) | N.A. | ATGGGAGTGACCGGCTGGCGGCTGTGCGAACGCATTAGCGCG |
| 10 | NLpep5 (w/ Met) | A.A. | MGVTGWRLCERISA |
| 11 | NLpep6 (w/ Met) | N.A. | ATGGACGTGACCGGCTGGCGGCTGTGCAAGCGCATTAGCGCG |
| 12 | NLpep6 (w/ Met) | A.A. | MDVTGWRLCKRISA |
| 13 | NLpep7 (w/ Met) | N.A. | ATGGACGTGACCGGCTGGCGGCTGTGCAAGCGCATTCTGGCG |
| 14 | NLpep7 (w/ Met) | A.A. | MDVTGWRLCKRILA |
| 15 | NLpep8 (w/ Met) | N.A. | ATGGACGTGACCGGCTGGCGGCTGTGCGAACGCATTAGCGCG |
| 16 | NLpep8 (w/ Met) | A.A. | MDVTGWRLCERISA |
| 17 | NLpep9 (w/ Met) | N.A. | ATGGGAGTGACCGGCTGGCGGCTGTGCAAGCGCATTAGCGCG |
| 18 | NLpep9 (w/ Met) | A.A. | MGVTGWRLCKRISA |
| 19 | NLpep10 (w/ Met) | N.A. | ATGGGAGTGACCGGCTGGCGGCTGAACGAACGCATTCTGGCG |
| 20 | NLpep10 (w/ Met) | A.A. | MGVTGWRLNERILA |
| 21 | NLpep11 (w/ Met) | N.A. | ATGGGAGTGACCGGCTGGCGGCTGCAGGAACGCATTCTGGCG |
| 22 | NLpep11 (w/ Met) | A.A. | MGVTGWRLQERILA |
| 23 | NLpep12 (w/ Met) | N.A. | ATGGGAGTGACCGGCTGGCGGCTGAAGAAGCGCCGGAGCCGG |
| 24 | NLpep12 (w/ Met) | A.A. | MGVTGWRLKKRRSR |
| 25 | NLpep13 (w/ Met) | N.A. | ATGAACGTGACCGGCTGGCGGCTGTGCAAGCGCATTAGCGCG |
| 26 | NLpep13 (w/ Met) | A.A. | MNVTGWRLCKRISA |
| 27 | NLpep14 (w/ Met) | N.A. | ATGAGCGTGACCGGCTGGCGGCTGTGCAAGCGCATTAGCGCG |
| 28 | NLpep14 (w/ Met) | A.A. | MSVTGWRLCKRISA |
| 29 | NLpep15 (w/ Met) | N.A. | ATGGAGGTGACCGGCTGGCGGCTGTGCAAGCGCATTAGCGCG |
| 30 | NLpep15 (w/ Met) | A.A. | MEVTGWRLCKRISA |
| 31 | NLpep16 (w/ Met) | N.A. | ATGGGCGTGACCGGCTGGCGGCTGTGCAAGCGCATTAGCGCG |
| 32 | NLpep16 (w/ Met) | A.A. | MGVTGWRLCKRISA |
| 33 | NLpep17 (w/ Met) | N.A. | ATGGGACACACCGGCTGGCGGCTGTGCAAGCGCATTAGCGCG |
| 34 | NLpep17 (w/ Met) | A.A. | MGITGWRLCKRISA |
| 35 | NLpep18 (w/ Met) | N.A. | ATGGGAGCCACCGGCTGGCGGCTGTGCAAGCGCATTAGCGCG |
| 36 | NLpep18 (w/ Met) | A.A. | MGATGWRLCKRISA |
| 37 | NLpep19 (w/ Met) | N.A. | ATGGGAAAGACCGGCTGGCGGCTGTGCAAGCGCATTAGCGCG |
| 38 | NLpep19 (w/ Met) | A.A. | MGKTGWRLCKRISA |
| 39 | NLpep20 (w/ Met) | N.A. | ATGGGACAGACCGGCTGGCGGCTGTGCAAGCGCATTAGCGCG |
| 40 | NLpep20 (w/ Met) | A.A. | MGQTGWRLCKRISA |
| 41 | NLpep21 (w/ Met) | N.A. | ATGGGAAGCACCGGCTGGCGGCTGTGCAAGCGCATTAGCGCG |
| 42 | NLpep21 (w/ Met) | A.A. | MGSTGWRLCKRISA |
| 43 | NLpep22 (w/ Met) | N.A. | ATGGGAGTGGTGGGCTGGCGGCTGTGCAAGCGCATTAGCGCG |
| 44 | NLpep22 (w/ Met) | A.A. | MGVVGWRLCKRISA |
| 45 | NLpep23 (w/ Met) | N.A. | ATGGGAGTGAAGGGCTGGCGGCTGTGCAAGCGCATTAGCGCG |
| 46 | NLpep23 (w/ Met) | A.A. | MGVKGWRLCKRISA |
| 47 | NLpep24 (w/ Met) | N.A. | ATGGGAGTGCAGGGCTGGCGGCTGTGCAAGCGCATTAGCGCG |
| 48 | NLpep24 (w/ Met) | A.A. | MGVQGWRLCKRISA |
| 49 | NLpep25 (w/ Met) | N.A. | ATGGGAGTGACCGGCACCCGGCTGTGCAAGCGCATTAGCGCG |
| 50 | NLpep25 (w/ Met) | A.A. | MGVTGTRLCKRISA |
| 51 | NLpep26 (w/ Met) | N.A. | ATGGGAGTGACCGGCAAGCGGCTGTGCAAGCGCATTAGCGCG |
| 52 | NLpep26 (w/ Met) | A.A. | MGVTGKRLCKRISA |
| 53 | NLpep27 (w/ Met) | N.A. | ATGGGAGTGACCGGCGTGCGGCTGTGCAAGCGCATTAGCGCG |
| 54 | NLpep27 (w/ Met) | A.A. | MGVTGVRLCKRISA |
| 55 | NLpep28 (w/ Met) | N.A. | ATGGGAGTGACCGGCTGGCGGCACTGCAAGCGCATTAGCGCG |
| 56 | NLpep28 (w/ Met) | A.A. | MGVTGWRICKRISA |
| 57 | NLpep29 (w/ Met) | N.A. | ATGGGAGTGACCGGCTGGCGGGTGTGCAAGCGCATTAGCGCG |
| 58 | NLpep29 (w/ Met) | A.A. | MGVTGWRVCKRISA |
| 59 | NLpep30 (w/ Met) | N.A. | ATGGGAGTGACCGGCTGGCGGACCTGCAAGCGCATTAGCGCG |
| 60 | NLpep30 (w/ Met) | A.A. | MGVTGWRTCKRISA |
| 61 | NLpep31 (w/ Met) | N.A. | ATGGGAGTGACCGGCTGGCGGTACTGCAAGCGCATTAGCGCG |
| 62 | NLpep31 (w/ Met) | A.A. | MGVTGWRYCKRISA |
| 63 | NLpep32 (w/ Met) | N.A. | ATGGGAGTGACCGGCTGGCGGAAGTGCAAGCGCATTAGCGCG |
| 64 | NLpep32 (w/ Met) | A.A. | MGVTGWRKCKRISA |
| 65 | NLpep33 (w/ Met) | N.A. | ATGGGAGTGACCGGCTGGCGGCTGAACAAGCGCATTAGCGCG |
| 66 | NLpep33 (w/ Met) | A.A. | MGVTGWRLNKRISA |
| 67 | NLpep34 (w/ Met) | N.A. | ATGGGAGTGACCGGCTGGCGGCTGACCAAGCGCATTAGCGCG |
| 68 | NLpep34 (w/ Met) | A.A. | MGVTGWRLTKRISA |
| 69 | NLpep35 (w/ Met) | N.A. | ATGGGAGTGACCGGCTGGCGGCTGTGCAAGAAGATTAGCGCG |
| 70 | NLpep35 (w/ Met) | A.A. | MGVTGWRLCKKISA |
| 71 | NLpep36 (w/ Met) | N.A. | ATGGGAGTGACCGGCTGGCGGCTGTGCAAGAACATTAGCGCG |
| 72 | NLpep36 (w/ Met) | A.A. | MGVTGWRLCKNISA |
| 73 | NLpep37 (w/ Met) | N.A. | ATGGGAGTGACCGGCTGGCGGCTGTGCAAGCGCGTGAGCGCG |
| 74 | NLpep37 (w/ Met) | A.A. | MGVTGWRLCKRVSA |
| 75 | NLpep38 (w/ Met) | N.A. | ATGGGAGTGACCGGCTGGCGGCTGTGCAAGCGCCAGAGCGCG |
| 76 | NLpep38 (w/ Met) | A.A. | MGVTGWRLCKRQSA |
| 77 | NLpep39 (w/ Met) | N.A. | ATGGGAGTGACCGGCTGGCGGCTGTGCAAGCGCGAGAGCGCG |
| 78 | NLpep39 (w/ Met) | A.A. | MGVTGWRLCKRESA |
| 79 | NLpep40 (w/ Met) | N.A. | ATGGGAGTGACCGGCTGGCGGCTGTGCAAGCGCCGGAGCGCG |
| 80 | NLpep40 (w/ Met) | A.A. | MGVTGWRLCKRRSA |
| 81 | NLpep41 (w/ Met) | N.A. | ATGGGAGTGACCGGCTGGCGGCTGTGCAAGCGCTTCAGCGCG |
| 82 | NLpep41 (w/ Met) | A.A. | MGVTGWRLCKRFSA |
| 83 | NLpep42 (w/ Met) | N.A. | ATGGGAGTGACCGGCTGGCGGCTGTGCAAGCGCATTAGCAAC |
| 84 | NLpep42 (w/ Met) | A.A. | MGVTGWRLCKRISN |
| 85 | NLpep43 (w/ Met) | N.A. | ATGGGAGTGACCGGCTGGCGGCTGTGCAAGCGCATTAGCACC |
| 86 | NLpep43 (w/ Met) | A.A. | MGVTGWRLCKRIST |
| 87 | NLpep44 (w/ Met) | N.A. | ATGGGAGTGACCGGCTGGCGGCTGTGCAAGCGCATTAGCCGG |
| 88 | NLpep44 (w/ Met) | A.A. | MGVTGWRLCKRISR |
| 89 | NLpep45 (w/ Met) | N.A. | ATGGGAGTGACCGGCTGGCGGCTGTGCAAGCGCATTAGCCTG |
| 90 | NLpep45 (w/ Met) | A.A. | MGVTGWRLCKRISL |
| 91 | NLpep46 (w/ Met) | N.A. | ATGGGAGTGACCGGCTGGCGGCTGTGCAAGCGCATTAGCGAG |
| 92 | NLpep46 (w/ Met) | A.A. | MGVTGWRLCKRISE |
| 93 | NLpep47 (w/ Met) | N.A. | ATGGGAGTGACCGGCTTCCGGCTGTGCAAGCGCATTAGCGCG |
| 94 | NLpep47 (w/ Met) | A.A. | MGVTGFRLCKRISA |
| 95 | NLpep48 (w/ Met) | N.A. | ATGGGAGTGACCGGCTACCGGCTGTGCAAGCGCATTAGCGCG |
| 96 | NLpep48 (w/ Met) | A.A. | MGVTGYRLCKRISA |
| 97 | NLpep49 (w/ Met) | N.A. | ATGGGAGTGACCGGCGAGCGGCTGTGCAAGCGCATTAGCGCG |
| 98 | NLpep49 (w/ Met) | A.A. | MGVTGERLCKRISA |
| 99 | NLpep50 (w/ Met) | N.A. | ATGCAGGTGACCGGCTGGCGGCTGTGCAAGCGCATTAGCGCG |
| 100 | NLpep50 (w/ Met) | A.A. | MQVTGWRLCKRISA |
| 101 | NLpep51 (w/ Met) | N.A. | ATGACCGTGACCGGCTGGCGGCTGTGCAAGCGCATTAGCGCG |
| 102 | NLpep51 (w/ Met) | A.A. | MTVTGWRLCKRISA |
| 103 | NLpep52 (w/ Met) | N.A. | ATGGGAGTGGAGGGCTGGCGGCTGTGCAAGCGCATTAGCGCG |
| 104 | NLpep52 (w/ Met) | A.A. | MGVEGWRLCKRISA |
| 105 | NLpep53 (w/ Met) | N.A. | ATGGGAGTGACCGGCTGGCGGCTGTTCAAGCGCATTAGCGCG |
| 106 | NLpep53 (w/ Met) | A.A. | MGVTGWRLFKRISA |
| 107 | NLpep54 (w/ Met) | N.A. | ATGGGAGTGACCGGCTGGCGGCTGTACAAGCGCATTAGCGCG |
| 108 | NLpep54 (w/ Met) | A.A. | MGVTGWRLYKRISA |
| 109 | NLpep55 (w/ Met) | N.A. | ATGGGAGTGACCGGCTGGCGGCTGAGCAAGCGCATTAGCGCG |
| 110 | NLpep55 (w/ Met) | A.A. | MGVTGWRLSKRISA |
| 111 | NLpep56 (w/ Met) | N.A. | ATGGGAGTGACCGGCTGGCGGCTGGGCAAGCGCATTAGCGCG |
| 112 | NLpep56 (w/ Met) | A.A. | MGVTGWRLHKRISA |
| 113 | NLpep57 (w/ Met) | N.A. | ATGGGAGTGACCGGCTGGCGGCTGATGAAGCGCATTAGCGCG |
| 114 | NLpep57 (w/ Met) | A.A. | MGVTGWRLMKRISA |
| 115 | NLpep58 (w/ Met) | N.A. | ATGGGAGTGACCGGCTGGCGGCTGGCCAAGCGCATTAGCGCG |
| 116 | NLpep58 (w/ Met) | A.A. | MGVTGWRLAKRISA |
| 117 | NLpep59 (w/ Met) | N.A. | ATGGGAGTGACCGGCTGGCGGCTGCAGAAGCGCATTAGCGCG |
| 118 | NLpep59 (w/ Met) | A.A. | MGVTGWRLQKRISA |
| 119 | NLpep60 (w/ Met) | N.A. | ATGGGAGTGACCGGCTGGCGGCTGCTGAAGCGCATTAGCGCG |
| 120 | NLpep60 (w/ Met) | A.A. | MGVTGWRLLKRISA |
| 121 | NLpep61 (w/ Met) | N.A. | ATGGGAGTGACCGGCTGGCGGCTGAAGAAGCGCATTAGCGCG |
| 122 | NLpep61 (w/ Met) | A.A. | MGVTGWRLKKRISA |
| 123 | NLpep62 (w/ Met) | N.A. | ATGAACCACACCGGCTGGCGGCTGAACAAGAAGGTGAGCAAC |
| 124 | NLpep62 (w/ Met) | A.A. | MNITGWRLNKKVSN |
| 125 | NLpep63 (w/ Met) | N.A. | ATGAACCACACCGGCTACCGGCTGAACAAGAAGGTGAGCAAC |
| 126 | NLpep63 (w/ Met) | A.A. | MNITGYRLNKKVSN |
| 127 | NLpep64 (w/ Met) | N.A. | ATGTGCGTGACCGGCTGGCGGCTGTTCAAGCGCATTAGCGCG |
| 128 | NLpep64 (w/ Met) | A.A. | MCVTGWRLFKRISA |
| 129 | NLpep65 (w/ Met) | N.A. | ATGCCCGTGACCGGCTGGCGGCTGTTCAAGCGCATTAGCGCG |
| 130 | NLpep65 (w/ Met) | A.A. | MPVTGWRLFKRISA |
| 131 | NLpep66 (w/ Met) | N.A. | ATGAACCACACCGGCTACCGGCTGTTCAAGAAGGTGAGCAAC |
| 132 | NLpep66 (w/ Met) | A.A. | MNITGYRLFKKVSN |
| 133 | NLpep67 (w/ Met) | N.A. | ATGAACGTGACCGGCTACCGGCTGTTCAAGAAGGTGAGCAAC |
| 134 | NLpep67 (w/ Met) | A.A. | MNVTGYRLFKKVSN |
| 135 | NLpep68 (w/ Met) | N.A. | ATGAACGTGACCGGCTGGCGGCTGTTCAAGAAGGTGAGCAAC |
| 136 | NLpep68 (w/ Met) | A.A. | MNVTGWRLFKKVSN |
| 137 | NLpep69 (w/ Met) | N.A. | ATGAACGTGACCGGCTGGCGGCTGTTCAAGAAGATTAGCAAC |
| 138 | NLpep69 (w/ Met) | A.A. | MNVTGWRLFKKISN |
| 139 | NLpep70 (w/ Met) | N.A. | ATGAACGTGACCGGCTGGCGGCTGTTCAAGCGCATTAGCAAC |
| 140 | NLpep70 (w/ Met) | A.A. | MNVTGWRLFKRISN |
| 141 | NLpep71 (w/ Met) | N.A. | ATGGGAGTGACCGGCTGGCGGCTGTTCAAGCGCATTAGCAAC |
| 142 | NLpep71 (w/ Met) | A.A. | MGVTGWRLFKRISN |
| 143 | NLpep72 (w/ Met) | N.A. | ATGAACGTGACCGGCTGGCGGCTGTTCGAACGCATTAGCAAC |
| 144 | NLpep72 (w/ Met) | A.A. | MNVTGWRLFERISN |
| 145 | NLpep73 (w/ Met) | N.A. | ATGAACGTGACCGGCTGGCGGCTGTTCAAGCGCATTCTGAAC |
| 146 | NLpep73 (w/ Met) | A.A. | MNVTGWRLFKRILN |
| 147 | NLpep74 (w/ Met) | N.A. | ATGAACGTGACCGGCTGGCGGCTGTTCAAGCGCATTAGCGCG |
| 148 | NLpep74 (w/ Met) | A.A. | MNVTGWRLFKRISA |
| 149 | NLpep75 (w/ Met) | N.A. | ATGAACGTGACCGGCTGGCGGCTGTTCGAAAAGATTAGCAAC |
| 150 | NLpep75 (w/ Met) | A.A. | MNVTGWRLFEKISN |
| 151 | NLpep76 (w/ Met) | N.A. | ATGAACGTGAGCGGCTGGCGGCTGTTCGAAAAGATTAGCAAC |
| 152 | NLpep76 (w/ Met) | A.A. | MNVSGWRLFEKISN |
| 153 | NLpep77 (w/ Met) | N.A. | ATG-GTGACCGGCTGGCGGCTGTTCAAGAAGATTAGCAAC |
| 154 | NLpep77 (w/ Met) | A.A. | M-VTGWRLFKKISN |
| 155 | NLpep78 (w/ Met) | N.A. | ATGAACGTGAGCGGCTGGCGGCTGTTCAAGAAGATTAGCAAC |
| 156 | NLpep78 (w/ Met) | A.A. | MNVSGWRLFKKISN |
| 157 | NLpep79 (w/ Met) | N.A. | ATGAACGTGACCGGCTACCGGCTGTTCAAGAAGATTAGCAAC |
| 158 | NLpep79 (w/ Met) | A.A. | MNVTGYRLFKKISN |
| 159 | NLpep80 (w/ Met) | N.A. | ATGGTGAGCGGCTGGCGGCTGTTCAAGAAGATTAGCAAC |
| 160 | NLpep80 (w/ Met) | A.A. | MVSGWRLFKKISN |
| 161 | NLpep81 (w/ Met) | N.A. | ATGAGCGGCTGGCGGCTGTTCAAGAAGATTAGCAAC |
| 440 | NLpep81 (w/ Met) | A.A. | MSGWRLFKKISN |
| 163 | NLpep82 (w/ Met) | N.A. | ATGGGCTGGCGGCTGTTCAAGAAGATTAGCAAC |
| 164 | NLpep82 (w/ Met) | A.A. | MGWRLFKKISN |
| 165 | NLpep83 (w/ Met) | N.A. | ATGAACGTGAGCGGCTGGCGGCTGTTCAAGAAGATTAGC |
| 166 | NLpep83 (w/ Met) | A.A. | MNVSGWRLFKKIS |
| 167 | NLpep84 (w/ Met) | N.A. | ATGAACGTGAGCGGCTGGCGGCTGTTCAAGAAGATT |
| 168 | NLpep84 (w/ Met) | A.A. | MNVSGWRLFKKI |
| 169 | NLpep85 (w/ Met) | N.A. | ATGAACGTGAGCGGCTGGCGGCTGTTCAAGAAG |
| 170 | NLpep85 (w/ Met) | A.A. | MNVSGWRLFKK |
| 171 | NLpep86 (w/ Met) | N.A. | ATGGTGAGCGGCTGGCGGCTGTTCAAGAAGATTAGC |
| 172 | NLpep86 (w/ Met) | A.A. | MVSGWRLFKKIS |
| 173 | NLpep87 (w/ Met) | N.A. | ATGAGCGGCTGGCGGCTGTTCAAGAAGATT |
| 174 | NLpep87 (w/ Met) | A.A. | MSGWRLFKKI |
| 175 | NLpep88 (w/ Met) | N.A. | ATGAACGTGAGCGGCTGGGGCCTGTTCAAGAAGATTAGCAAC |
| 176 | NLpep88 (w/ Met) | A.A. | MNVSGWGLFKKISN |
| 177 | NLpep89 (w/ Met) | N.A. | ATGCCCGTGAGCGGCTGGCGGCTGTTCAAGAAGATTAGCAAC |
| 178 | NLpep89 (w/ Met) | A.A. | MPVSGWRLFKKISN |
| 179 | NLpep90 (w/ Met) | N.A. | ATGAACCCCGTGAGCGGCTGGCGGCTGTTCAAGAAGATTAGCAAC |
| 180 | NLpep90 (w/ Met) | A.A. | MNPVSGWRLFKKISN |
| 181 | NLpep91 (w/ Met) | N.A. | ATGATCAACCCCGTGAGCGGCTGGCGGCTGTTCAAGAAGATTAGCAAC |
| 182 | NLpep91 (w/ Met) | A.A. | MINPVSGWRLFKKISN |
| 183 | NLpep92 (w/ Met) | N.A. | ATGACCATCAACCCCGTGAGCGGCTGGCGGCTGTTCAAGAAGATTAGCAAC |
| 184 | NLpep92 (w/ Met) | A.A. | MTINPVSGWRLFKKISN |
| 185 | NLpep93 (w/ Met) | N.A. | ATGGTGACCATCAACCCCGTGAGCGGCTGGCGGCTGTTCAAGAAGATTAGCAAC |
| 186 | NLpep93 (w/ Met) | A.A. | MVTINPVSGWRLFKKISN |
| 187 | NLpep94 (w/ Met) | N.A. | ATGCGGGTGACCATCAACCCCGTGAGCGGCTGGCGGCTGTTCAAGAAGATTAGCAAC |
| 188 | NLpep94 (w/ Met) | A.A. | MRVTINPVSGWRLFKKISN |
| 189 | NLpep95 (w/ Met) | N.A. | ATGAGCGGCTGGCGGCTGCTGAAGAAGATT |
| 190 | NLpep95 (w/ Met) | A.A. | MSGWRLLKKI |
| 191 | NLpep96 (w/ Met) | N.A. | ATGACCGGCTACCGGCTGCTGAAGAAGATT |
| 192 | NLpep96 (w/ Met) | A.A. | MTGYRLLKKI |
| 193 | NLpep97 (w/ Met) | N.A. | ATGAGCGGCTGGCGGCTGTTCAAGAAG |
| 194 | NLpep97 (w/ Met) | A.A. | MSGWRLFKK |
| 195 | NLpep98 (w/ Met) | N.A. | ATGGTGACCGGCTACCGGCTGTTCAAGAAGATTAGC |
| 196 | NLpep98 (w/ Met) | A.A. | MVTGYRLFKKIS |
| 197 | NLpep99 (w/ Met) | N.A. | ATGGTGACCGGCTACCGGCTGTTCGAGAAGATTAGC |
| 198 | NLpep99 (w/ Met) | A.A. | MVTGYRLFEKIS |
| 199 | NLpep100 (w/ Met) | N.A. | ATGGTGACCGGCTACCGGCTGTTCGAGCAGATTAGC |
| 200 | NLpep100 (w/ Met) | A.A. | MVTGYRLFEQIS |
| 201 | NLpep101 (w/ Met) | N.A. | ATGGTGACCGGCTACCGGCTGTTCGAGAAGGAGAGC |
| 202 | NLpep101 (w/ Met) | A.A. | MVTGYRLFEKES |
| 203 | NLpep102 (w/ Met) | N.A. | ATGGTGACCGGCTACCGGCTGTTCGAGCAGGAGAGC |
| 204 | NLpep102 (w/ Met) | A.A. | MVTGYRLFEQES |
| 205 | NLpep103 (w/ Met) | N.A. | ATGGTGACCGGCTACCGGCTGTTCGAGCAGGAGCTG |
| 206 | NLpep103 (w/ Met) | A.A. | MVTGYRLFEQEL |
| 207 | NLpep104 (w/ Met) | N.A. | ATGGTGGAGGGCTACCGGCTGTTCGAGAAGATTAGC |
| 208 | NLpep104 (w/ Met) | A.A. | MVEGYRLFEKIS |
| 209 | NLpep105 (w/ Met) | N.A. | ATGGTGGAGGGCTACCGGCTGTTCGAGCAGATTAGC |
| 210 | NLpep105 (w/ Met) | A.A. | MVEGYRLFEQIS |
| 211 | NLpep106 (w/ Met) | N.A. | ATGGTGGAGGGCTACCGGCTGTTCGAGAAGGAGAGC |
| 212 | NLpep106 (w/ Met) | A.A. | MVEGYRLFEKES |
| 213 | NLpep107 (w/ Met) | N.A. | ATGGTGGAGGGCTACCGGCTGTTCGAGCAGGAGAGC |
| 214 | NLpep107 (w/ Met) | A.A. | MVEGYRLFEQES |
| 215 | NLpep108 (w/ Met) | N.A. | ATGGTGGAGGGCTACCGGCTGTTCGAGCAGGAGCTG |
| 216 | NLpep108 (w/ Met) | A.A. | MVEGYRLFEQEL |
| 217 | NLpep109 (w/ Met) | N.A. | ATGATTAGCGGCTGGCGGCTGATGAAGAACATTAGC |
| 218 | NLpep109 (w/ Met) | A.A. | MISGWRLMKNIS |
| 219 | NLpep110 (w/ Met) | N.A. | ATGGTGGAGGGCTACCGGCTGTTCAAGAAGATTAGC |
| 220 | NLpep110 (w/ Met) | A.A. | MVEGYRLFKKIS |
| 221 | NLpep2 (w/o Met) | N.A. | GACGTGACCGGCTGGCGGCTGTGCGAACGCATTCTGGCG |
| 222 | NLpep2 (w/o Met) | A.A. | DVTGWRLCERILA |
| 223 | NLpep3 (w/o Met) | N.A. | GGAGTGACCGCCTGGCGGCTGTGCGAACGCATTCTGGCG |
| 224 | NLpep3 (w/o Met) | A.A. | GVTAWRLCERILA |
| 225 | NLpep4 (w/o Met) | N.A. | GGAGTGACCGGCTGGCGGCTGTGCAAGCGCATTCTGGCG |
| 226 | NLpep4 (w/o Met) | A.A. | GVTGWRLCKRILA |
| 227 | NLpep5 (w/o Met) | N.A. | GGAGTGACCGGCTGGCGGCTGTGCGAACGCATTAGCGCG |
| 228 | NLpep5 (w/o Met) | A.A. | GVTGWRLCERISA |
| 229 | NLpep6 (w/o Met) | N.A. | GACGTGACCGGCTGGCGGCTGTGCAAGCGCATTAGCGCG |
| 230 | NLpep6 (w/o Met) | A.A. | DVTGWRLCKRISA |
| 231 | NLpep7 (w/o Met) | N.A. | GACGTGACCGGCTGGCGGCTGTGCAAGCGCATTCTGGCG |
| 232 | NLpep7 (w/o Met) | A.A. | DVTGWRLCKRILA |
| 233 | NLpep8 (w/o Met) | N.A. | GACGTGACCGGCTGGCGGCTGTGCGAACGCATTAGCGCG |
| 234 | NLpep8 (w/o Met) | A.A. | DVTGWRLCERISA |
| 235 | NLpep9 (w/o Met) | N.A. | GGAGTGACCGGCTGGCGGCTGTGCAAGCGCATTAGCGCG |
| 236 | NLpep9 (w/o Met) | A.A. | GVTGWRLCKRISA |
| 237 | NLpep10 (w/o Met) | N.A. | GGAGTGACCGGCTGGCGGCTGAACGAACGCATTCTGGCG |
| 238 | NLpep10 (w/o Met) | A.A. | GVTGWRLNERILA |
| 239 | NLpep11 (w/o Met) | N.A. | GGAGTGACCGGCTGGCGGCTGCAGGAACGCATTCTGGCG |
| 240 | NLpep11 (w/o Met) | A.A. | GVTGWRLQERILA |
| 241 | NLpep12 (w/o Met) | N.A. | GGAGTGACCGGCTGGCGGCTGAAGAAGCGCCGGAGCCGG |
| 242 | NLpep12 (w/o Met) | A.A. | GVTGWRLKKRRSR |
| 243 | NLpep13 (w/o Met) | N.A. | AACGTGACCGGCTGGCGGCTGTGCAAGCGCATTAGCGCG |
| 244 | NLpep13 (w/o Met) | A.A. | NVTGWRLCKRISA |
| 245 | NLpep14 (w/o Met) | N.A. | AGCGTGACCGGCTGGCGGCTGTGCAAGCGCATTAGCGCG |
| 246 | NLpep14 (w/o Met) | A.A. | SVTGWRLCKRISA |
| 247 | NLpep15 (w/o Met) | N.A. | GAGGTGACCGGCTGGCGGCTGTGCAAGCGCATTAGCGCG |
| 248 | NLpep15 (w/o Met) | A.A. | EVTGWRLCKRISA |
| 249 | NLpep16 (w/o Met) | N.A. | GGCGTGACCGGCTGGCGGCTGTGCAAGCGCATTAGCGCG |
| 250 | NLpep16 (w/o Met) | A.A. | HVTGWRLCKRISA |
| 251 | NLpep17 (w/o Met) | N.A. | GGACACACCGGCTGGCGGCTGTGCAAGCGCATTAGCGCG |
| 252 | NLpep17 (w/o Met) | A.A. | GITGWRLCKRISA |
| 253 | NLpep18 (w/o Met) | N.A. | GGAGCCACCGGCTGGCGGCTGTGCAAGCGCATTAGCGCG |
| 254 | NLpep18 (w/o Met) | A.A. | GATGWRLCKRISA |
| 255 | NLpep19 (w/o Met) | N.A. | GGAAAGACCGGCTGGCGGCTGTGCAAGCGCATTAGCGCG |
| 256 | NLpep19 (w/o Met) | A.A. | GKTGWRLCKRISA |
| 257 | NLpep20 (w/o Met) | N.A. | GGACAGACCGGCTGGCGGCTGTGCAAGCGCATTAGCGCG |
| 258 | NLpep20 (w/o Met) | A.A. | GQTGWRLCKRISA |
| 259 | NLpep21 (w/o Met) | N.A. | GGAAGCACCGGCTGGCGGCTGTGCAAGCGCATTAGCGCG |
| 260 | NLpep21 (w/o Met) | A.A. | GSTGWRLCKRISA |
| 261 | NLpep22 (w/o Met) | N.A. | GGAGTGGTGGGCTGGCGGCTGTGCAAGCGCATTAGCGCG |
| 262 | NLpep22 (w/o Met) | A.A. | GVVGWRLCKRISA |
| 263 | NLpep23 (w/o Met) | N.A. | GGAGTGAAGGGCTGGCGGCTGTGCAAGCGCATTAGCGCG |
| 264 | NLpep23 (w/o Met) | A.A. | GVKGWRLCKRISA |
| 265 | NLpep24 (w/o Met) | N.A. | GGAGTGCAGGGCTGGCGGCTGTGCAAGCGCATTAGCGCG |
| 266 | NLpep24 (w/o Met) | A.A. | GVQGWRLCKRISA |
| 267 | NLpep25 (w/o Met) | N.A. | GGAGTGACCGGCACCCGGCTGTGCAAGCGCATTAGCGCG |
| 268 | NLpep25 (w/o Met) | A.A. | GVTGTRLCKRISA |
| 269 | NLpep26 (w/o Met) | N.A. | GGAGTGACCGGCAAGCGGCTGTGCAAGCGCATTAGCGCG |
| 270 | NLpep26 (w/o Met) | A.A. | GVTGKRLCKRISA |
| 271 | NLpep27 (w/o Met) | N.A. | GGAGTGACCGGCGTGCGGCTGTGCAAGCGCATTAGCGCG |
| 272 | NLpep27 (w/o Met) | A.A. | GVTGVRLCKRISA |
| 273 | NLpep28 (w/o Met) | N.A. | GGAGTGACCGGCTGGCGGCACTGCAAGCGCATTAGCGCG |
| 274 | NLpep28 (w/o Met) | A.A. | GVTGWRICKRISA |
| 275 | NLpep29 (w/o Met) | N.A. | GGAGTGACCGGCTGGCGGGTGTGCAAGCGCATTAGCGCG |
| 276 | NLpep29 (w/o Met) | A.A. | GVTGWRVCKRISA |
| 277 | NLpep30 (w/o Met) | N.A. | GGAGTGACCGGCTGGCGGACCTGCAAGCGCATTAGCGCG |
| 278 | NLpep30 (w/o Met) | A.A. | GVTGWRTCKRISA |
| 279 | NLpep31 (w/o Met) | N.A. | GGAGTGACCGGCTGGCGGTACTGCAAGCGCATTAGCGCG |
| 280 | NLpep31 (w/o Met) | A.A. | GVTGWRYCKRISA |
| 281 | NLpep32 (w/o Met) | N.A. | GGAGTGACCGGCTGGCGGAAGTGCAAGCGCATTAGCGCG |
| 282 | NLpep32 (w/o Met) | A.A. | GVTGWRKCKRISA |
| 283 | NLpep33 (w/o Met) | N.A. | GGAGTGACCGGCTGGCGGCTGAACAAGCGCATTAGCGCG |
| 284 | NLpep33 (w/o Met) | A.A. | GVTGWRLNKRISA |
| 285 | NLpep34 (w/o Met) | N.A. | GGAGTGACCGGCTGGCGGCTGACCAAGCGCATTAGCGCG |
| 286 | NLpep34 (w/o Met) | A.A. | GVTGWRLTKRISA |
| 287 | NLpep35 (w/o Met) | N.A. | GGAGTGACCGGCTGGCGGCTGTGCAAGAAGATTAGCGCG |
| 288 | NLpep35 (w/o Met) | A.A. | GVTGWRLCKKISA |
| 289 | NLpep36 (w/o Met) | N.A. | GGAGTGACCGGCTGGCGGCTGTGCAAGAACATTAGCGCG |
| 290 | NLpep36 (w/o Met) | A.A. | GVTGWRLCKNISA |
| 291 | NLpep37 (w/o Met) | N.A. | GGAGTGACCGGCTGGCGGCTGTGCAAGCGCGTGAGCGCG |
| 292 | NLpep37 (w/o Met) | A.A. | GVTGWRLCKRVSA |
| 293 | NLpep38 (w/o Met) | N.A. | GGAGTGACCGGCTGGCGGCTGTGCAAGCGCCAGAGCGCG |
| 294 | NLpep38 (w/o Met) | A.A. | GVTGWRLCKRQSA |
| 295 | NLpep39 (w/o Met) | N.A. | GGAGTGACCGGCTGGCGGCTGTGCAAGCGCGAGAGCGCG |
| 296 | NLpep39 (w/o Met) | A.A. | GVTGWRLCKRESA |
| 297 | NLpep40 (w/o Met) | N.A. | GGAGTGACCGGCTGGCGGCTGTGCAAGCGCCGGAGCGCG |
| 298 | NLpep40 (w/o Met) | A.A. | GVTGWRLCKRRSA |
| 299 | NLpep41 (w/o Met) | N.A. | GGAGTGACCGGCTGGCGGCTGTGCAAGCGCTTCAGCGCG |
| 300 | NLpep41 (w/o Met) | A.A. | GVTGWRLCKRFSA |
| 301 | NLpep42 (w/o Met) | N.A. | GGAGTGACCGGCTGGCGGCTGTGCAAGCGCATTAGCAAC |
| 302 | NLpep42 (w/o Met) | A.A. | GVTGWRLCKRISN |
| 303 | NLpep43 (w/o Met) | N.A. | GGAGTGACCGGCTGGCGGCTGTGCAAGCGCATTAGCACC |
| 304 | NLpep43 (w/o Met) | A.A. | GVTGWRLCKRIST |
| 305 | NLpep44 (w/o Met) | N.A. | GGAGTGACCGGCTGGCGGCTGTGCAAGCGCATTAGCCGG |
| 306 | NLpep44 (w/o Met) | A.A. | GVTGWRLCKRISR |
| 307 | NLpep45 (w/o Met) | N.A. | GGAGTGACCGGCTGGCGGCTGTGCAAGCGCATTAGCCTG |
| 308 | NLpep45 (w/o Met) | A.A. | GVTGWRLCKRISL |
| 309 | NLpep46 (w/o Met) | N.A. | GGAGTGACCGGCTGGCGGCTGTGCAAGCGCATTAGCGAG |
| 310 | NLpep46 (w/o Met) | A.A. | GVTGWRLCKRISE |
| 311 | NLpep47 (w/o Met) | N.A. | GGAGTGACCGGCTTCCGGCTGTGCAAGCGCATTAGCGCG |
| 312 | NLpep47 (w/o Met) | A.A. | GVTGFRLCKRISA |
| 313 | NLpep48 (w/o Met) | N.A. | GGAGTGACCGGCTACCGGCTGTGCAAGCGCATTAGCGCG |
| 314 | NLpep48 (w/o Met) | A.A. | GVTGYRLCKRISA |
| 315 | NLpep49 (w/o Met) | N.A. | GGAGTGACCGGCGAGCGGCTGTGCAAGCGCATTAGCGCG |
| 316 | NLpep49 (w/o Met) | A.A. | GVTGERLCKRISA |
| 317 | NLpep50 (w/o Met) | N.A. | CAGGTGACCGGCTGGCGGCTGTGCAAGCGCATTAGCGCG |
| 318 | NLpep50 (w/o Met) | A.A. | QVTGWRLCKRISA |
| 319 | NLpep51 (w/o Met) | N.A. | ACCGTGACCGGCTGGCGGCTGTGCAAGCGCATTAGCGCG |
| 320 | NLpep51 (w/o Met) | A.A. | TVTGWRLCKRISA |
| 321 | NLpep52 (w/o Met) | N.A. | GGAGTGGAGGGCTGGCGGCTGTGCAAGCGCATTAGCGCG |
| 322 | NLpep52 (w/o Met) | A.A. | GVEGWRLCKRISA |
| 323 | NLpep53 (w/o Met) | N.A. | GGAGTGACCGGCTGGCGGCTGTTCAAGCGCATTAGCGCG |
| 324 | NLpep53 (w/o Met) | A.A. | GVTGWRLFKRISA |
| 325 | NLpep54 (w/o Met) | N.A. | GGAGTGACCGGCTGGCGGCTGTACAAGCGCATTAGCGCG |
| 326 | NLpep54 (w/o Met) | A.A. | GVTGWRLYKRISA |
| 327 | NLpep55 (w/o Met) | N.A. | GGAGTGACCGGCTGGCGGCTGAGCAAGCGCATTAGCGCG |
| 328 | NLpep55 (w/o Met) | A.A. | GVTGWRLSKRISA |
| 329 | NLpep56 (w/o Met) | N.A. | GGAGTGACCGGCTGGCGGCTGGGCAAGCGCATTAGCGCG |
| 330 | NLpep56 (w/o Met) | A.A. | GVTGWRLHKRISA |
| 331 | NLpep57 (w/o Met) | N.A. | GGAGTGACCGGCTGGCGGCTGATGAAGCGCATTAGCGCG |
| 332 | NLpep57 (w/o Met) | A.A. | GVTGWRLMKRISA |
| 333 | NLpep58 (w/o Met) | N.A. | GGAGTGACCGGCTGGCGGCTGGCCAAGCGCATTAGCGCG |
| 334 | NLpep58 (w/o Met) | A.A. | GVTGWRLAKRISA |
| 335 | NLpep59 (w/o Met) | N.A. | GGAGTGACCGGCTGGCGGCTGCAGAAGCGCATTAGCGCG |
| 336 | NLpep59 (w/o Met) | A.A. | GVTGWRLQKRISA |
| 337 | NLpep60 (w/o Met) | N.A. | GGAGTGACCGGCTGGCGGCTGCTGAAGCGCATTAGCGCG |
| 338 | NLpep60 (w/o Met) | A.A. | GVTGWRLLKRISA |
| 339 | NLpep61 (w/o Met) | N.A. | GGAGTGACCGGCTGGCGGCTGAAGAAGCGCATTAGCGCG |
| 340 | NLpep61 (w/o Met) | A.A. | GVTGWRLKKRISA |
| 341 | NLpep62 (w/o Met) | N.A. | AACCACACCGGCTGGCGGCTGAACAAGAAGGTGAGCAAC |
| 342 | NLpep62 (w/o Met) | A.A. | NITGWRLNKKVSN |
| 343 | NLpep63 (w/o Met) | N.A. | AACCACACCGGCTACCGGCTGAACAAGAAGGTGAGCAAC |
| 344 | NLpep63 (w/o Met) | A.A. | NITGYRLNKKVSN |
| 345 | NLpep64 (w/o Met) | N.A. | TGCGTGACCGGCTGGCGGCTGTTCAAGCGCATTAGCGCG |
| 346 | NLpep64 (w/o Met) | A.A. | CVTGWRLFKRISA |
| 347 | NLpep65 (w/o Met) | N.A. | CCCGTGACCGGCTGGCGGCTGTTCAAGCGCATTAGCGCG |
| 348 | NLpep65 (w/o Met) | A.A. | PVTGWRLFKRISA |
| 349 | NLpep66 (w/o Met) | N.A. | AACCACACCGGCTACCGGCTGTTCAAGAAGGTGAGCAAC |
| 350 | NLpep66 (w/o Met) | A.A. | NITGYRLFKKVSN |
| 351 | NLpep67 (w/o Met) | N.A. | AACGTGACCGGCTACCGGCTGTTCAAGAAGGTGAGCAAC |
| 352 | NLpep67 (w/o Met) | A.A. | NVTGYRLFKKVSN |
| 353 | NLpep68 (w/o Met) | N.A. | AACGTGACCGGCTGGCGGCTGTTCAAGAAGGTGAGCAAC |
| 354 | NLpep68 (w/o Met) | A.A. | NVTGWRLFKKVSN |
| 355 | NLpep69 (w/o Met) | N.A. | AACGTGACCGGCTGGCGGCTGTTCAAGAAGATTAGCAAC |
| 356 | NLpep69 (w/o Met) | A.A. | NVTGWRLFKKISN |
| 357 | NLpep70 (w/o Met) | N.A. | AACGTGACCGGCTGGCGGCTGTTCAAGCGCATTAGCAAC |
| 358 | NLpep70 (w/o Met) | A.A. | NVTGWRLFKRISN |
| 359 | NLpep71 (w/o Met) | N.A. | GGAGTGACCGGCTGGCGGCTGTTCAAGCGCATTAGCAAC |
| 360 | NLpep71 (w/o Met) | A.A. | GVTGWRLFKRISN |
| 361 | NLpep72 (w/o Met) | N.A. | AACGTGACCGGCTGGCGGCTGTTCGAACGCATTAGCAAC |
| 362 | NLpep72 (w/o Met) | A.A. | NVTGWRLFERISN |
| 363 | NLpep73 (w/o Met) | N.A. | AACGTGACCGGCTGGCGGCTGTTCAAGCGCATTCTGAAC |
| 364 | NLpep73 (w/o Met) | A.A. | NVTGWRLFKRILN |
| 365 | NLpep74 (w/o Met) | N.A. | AACGTGACCGGCTGGCGGCTGTTCAAGCGCATTAGCGCG |
| 366 | NLpep74 (w/o Met) | A.A. | NVTGWRLFKRISA |
| 367 | NLpep75 (w/o Met) | N.A. | AACGTGACCGGCTGGCGGCTGTTCGAAAAGATTAGCAAC |
| 368 | NLpep75 (w/o Met) | A.A. | NVTGWRLFEKISN |
| 369 | NLpep76 (w/o Met) | N.A. | AACGTGAGCGGCTGGCGGCTGTTCGAAAAGATTAGCAAC |
| 370 | NLpep76 (w/o Met) | A.A. | NVSGWRLFEKISN |
| 371 | NLpep77 (w/o Met) | N.A. | GTGACCGGCTGGCGGCTGTTCAAGAAGATTAGCAAC |
| 372 | NLpep77 (w/o Met) | A.A. | VTGWRLFKKISN |
| 373 | NLpep78 (w/o Met) | N.A. | AACGTGAGCGGCTGGCGGCTGTTCAAGAAGATTAGCAAC |
| 374 | NLpep78 (w/o Met) | A.A. | NVSGWRLFKKISN |
| 375 | NLpep79 (w/o Met) | N.A. | AACGTGACCGGCTACCGGCTGTTCAAGAAGATTAGCAAC |
| 376 | NLpep79 (w/o Met) | A.A. | NVTGYRLFKKISN |
| 377 | NLpep80 (w/o Met) | N.A. | GTGAGCGGCTGGCGGCTGTTCAAGAAGATTAGCAAC |
| 378 | NLpep80 (w/o Met) | A.A. | VSGWRLFKKISN |
| 379 | NLpep81 (w/o Met) | N.A. | AGCGGCTGGCGGCTGTTCAAGAAGATTAGCAAC |
| 380 | NLpep81 (w/o Met) | A.A. | SGWRLFKKISN |
| 381 | NLpep82 (w/o Met) | N.A. | GGCTGGCGGCTGTTCAAGAAGATTAGCAAC |
| 382 | NLpep82 (w/o Met) | A.A. | GWRLFKKISN |
| 383 | NLpep83 (w/o Met) | N.A. | AACGTGAGCGGCTGGCGGCTGTTCAAGAAGATTAGC |
| 384 | NLpep83 (w/o Met) | A.A. | NVSGWRLFKKIS |
| 385 | NLpep84 (w/o Met) | N.A. | AACGTGAGCGGCTGGCGGCTGTTCAAGAAGATT |
| 386 | NLpep84 (w/o Met) | A.A. | NVSGWRLFKKI |
| 387 | NLpep85 (w/o Met) | N.A. | AACGTGAGCGGCTGGCGGCTGTTCAAGAAG |
| 388 | NLpep85 (w/o Met) | A.A. | NVSGWRLFKK |
| 389 | NLpep86 (w/o Met) | N.A. | GTGAGCGGCTGGCGGCTGTTCAAGAAGATTAGC |
| 390 | NLpep86 (w/o Met) | A.A. | VSGWRLFKKIS |
| 391 | NLpep87 (w/o Met) | N.A. | AGCGGCTGGCGGCTGTTCAAGAAGATT |
| 392 | NLpep87 (w/o Met) | A.A. | SGWRLFKKI |
| 393 | NLpep88 (w/o Met) | N.A. | AACGTGAGCGGCTGGGGCCTGTTCAAGAAGATTAGCAAC |
| 394 | NLpep88 (w/o Met) | A.A. | NVSGWGLFKKISN |
| 395 | NLpep89 (w/o Met) | N.A. | CCCGTGAGCGGCTGGCGGCTGTTCAAGAAGATTAGCAAC |
| 396 | NLpep89 (w/o Met) | A.A. | PVSGWRLFKKISN |
| 397 | NLpep90 (w/o Met) | N.A. | AACCCCGTGAGCGGCTGGCGGCTGTTCAAGAAGATTAGCAAC |
| 398 | NLpep90 (w/o Met) | A.A. | NPVSGWRLFKKISN |
| 399 | NLpep91 (w/o Met) | N.A. | ATCAACCCCGTGAGCGGCTGGCGGCTGTTCAAGAAGATTAGCAAC |
| 400 | NLpep91 (w/o Met) | A.A. | INPVSGWRLFKKISN |
| 401 | NLpep92 (w/o Met) | N.A. | ACCATCAACCCCGTGAGCGGCTGGCGGCTGTTCAAGAAGATTAGCAAC |
| 402 | NLpep92 (w/o Met) | A.A. | TINPVSGWRLFKKISN |
| 403 | NLpep93 (w/o Met) | N.A. | GTGACCATCAACCCCGTGAGCGGCTGGCGGCTGTTCAAGAAGATTAGCAAC |
| 404 | NLpep93 (w/o Met) | A.A. | VTINPVSGWRLFKKISN |
| 405 | NLpep94 (w/o Met) | N.A. | CGGGTGACCATCAACCCCGTGAGCGGCTGGCGGCTGTTCAAGAAGATTAGCAAC |
| 406 | NLpep94 (w/o Met) | A.A. | RVTINPVSGWRLFKKISN |
| 407 | NLpep95 (w/o Met) | N.A. | AGCGGCTGGCGGCTGCTGAAGAAGATT |
| 408 | NLpep95 (w/o Met) | A.A. | SGWRLLKKI |
| 409 | NLpep96 (w/o Met) | N.A. | ACCGGCTACCGGCTGCTGAAGAAGATT |
| 410 | NLpep96 (w/o Met) | A.A. | TGYRLLKKI |
| 411 | NLpep97 (w/o Met) | N.A. | AGCGGCTGGCGGCTGTTCAAGAAG |
| 412 | NLpep97 (w/o Met) | A.A. | SGWRLFKK |
| 413 | NLpep98 (w/o Met) | N.A. | GTGACCGGCTACCGGCTGTTCAAGAAGATTAGC |
| 414 | NLpep98 (w/o Met) | A.A. | VTGYRLFKKIS |
| 415 | NLpep99 (w/o Met) | N.A. | GTGACCGGCTACCGGCTGTTCGAGAAGATTAGC |
| 416 | NLpep99 (w/o Met) | A.A. | VTGYRLFEKIS |
| 417 | NLpep100 (w/o Met) | N.A. | GTGACCGGCTACCGGCTGTTCGAGCAGATTAGC |
| 418 | NLpep100 (w/o Met) | A.A. | VTGYRLFEQIS |
| 419 | NLpep101 (w/o Met) | N.A. | GTGACCGGCTACCGGCTGTTCGAGAAGGAGAGC |
| 420 | NLpep101 (w/o Met) | A.A. | VTGYRLFEKES |
| 421 | NLpep102 (w/o Met) | N.A. | GTGACCGGCTACCGGCTGTTCGAGCAGGAGAGC |
| 422 | NLpep102 (w/o Met) | A.A. | VTGYRLFEQES |
| 423 | NLpep103 (w/o Met) | N.A. | GTGACCGGCTACCGGCTGTTCGAGCAGGAGCTG |
| 424 | NLpep103 (w/o Met) | A.A. | VTGYRLFEQEL |
| 425 | NLpep104 (w/o Met) | N.A. | GTGGAGGGCTACCGGCTGTTCGAGAAGATTAGC |
| 426 | NLpep104 (w/o Met) | A.A. | VEGYRLFEKIS |
| 427 | NLpep105 (w/o Met) | N.A. | GTGGAGGGCTACCGGCTGTTCGAGCAGATTAGC |
| 428 | NLpep105 (w/o Met) | A.A. | VEGYRLFEQIS |
| 429 | NLpep106 (w/o Met) | N.A. | GTGGAGGGCTACCGGCTGTTCGAGAAGGAGAGC |
| 430 | NLpep106 (w/o Met) | A.A. | VEGYRLFEKES |
| 431 | NLpep107 (w/o Met) | N.A. | GTGGAGGGCTACCGGCTGTTCGAGCAGGAGAGC |
| 432 | NLpep107 (w/o Met) | A.A. | VEGYRLFEQES |
| 433 | NLpep108 (w/o Met) | N.A. | GTGGAGGGCTACCGGCTGTTCGAGCAGGAGCTG |
| 434 | NLpep108 (w/o Met) | A.A. | VEGYRLFEQEL |
| 435 | NLpep109 (w/o Met) | N.A. | ATTAGCGGCTGGCGGCTGATGAAGAACATTAGC |
| 436 | NLpep109 (w/o Met) | A.A. | ISGWRLMKNIS |
| 437 | NLpep110 (w/o Met) | N.A. | GTGGAGGGCTACCGGCTGTTCAAGAAGATTAGC |
| 438 | NLpep110 (w/o Met) | A.A. | VEGYRLFKKIS |

[0196] In certain embodiments, a peptide from Table 1 is provided. In some embodiments, peptides comprise a single amino acid difference from GVTGWRLCKRISA (SEQ ID NO: 236) and/or any of the peptides listed in Table 1. In some embodiments, peptides comprise two or more (e.g., 2, 3, 4, 5, 6, 7, 8, 9, 10, etc.) amino acid differences from GVTGWRLCKRISA (SEQ ID NO: 236) and/or any of the peptides listed in Table 1. In some embodiments, peptides are provided comprising one of the amino acid sequences of SEQ ID NOS: 3-438. In some embodiments, peptides are provided comprising one of the amino acid sequences of SEQ ID NOS: 3-438 with one or more additions, substitutions, and/or deletions. In some embodiments, a peptide or a portion thereof comprises greater than 70% sequence identity (e.g., 71%, 75%, 80%, 85%, 90%, 95%, 99%) with one or more of the amino acid sequence of SEQ ID NOS: 3-438. In some embodiments, nucleic acids are provided comprising one of the nucleic acid coding sequences of SEQ ID NOS: 3-438. In some embodiments, nucleic acids are provided comprising one of the nucleic acid sequences of SEQ ID NOS: 3-438 with one or more additions, substitutions, and/or deletions. In some embodiments, a nucleic acid or a portion thereof comprises greater than 70% sequence identity (e.g., 71%, 75%, 80%, 85%, 90%, 95%, 99%) with one or more of the nucleic acid sequence of SEQ ID NOS: 3-438. In some embodiments, nucleic acids are provided that code for one of the amino acid sequences of SEQ ID NOS: 3-438. In some embodiments, nucleic acids are provided that code for one of the amino acid sequences of SEQ ID NOS: 3-438 with one or more additions, substitutions, and/or deletions. In some embodiments, a nucleic acid is provided that codes for an amino acid with greater than 70% sequence identity (e.g., 71%, 75%, 80%, 85%, 90%, 95%, 99%) with one or more of the amino acid sequences of SEQ ID NOS: 3-438.

[0197] In certain embodiments, a nucleic acid from Table 1 is provided. In some embodiments, a nucleic acid encoding a peptide from Table 1 is provided. In some embodiments, a nucleic acid of the present invention codes for a peptide that comprises a single amino acid difference from MGVTGWRLCERILA (SEQ ID NO: 2) and/or any of the peptides listed in Table 1. In some embodiments, nucleic acids code for peptidespeptide comprising two or more (e.g., 2, 3, 4, 5, 6, 7, 8, 9, 10, etc.) amino acid differences from MGVTGWRLCERILA (SEQ ID NO: 2) and/or any of the peptides listed in Table 1. In some embodiments, nucleic acids are provided comprising the sequence of one of the nucleic acids in Table 1. In some embodiments, nucleic acids are provided comprising one of the nucleic acids of Table 1 with one or more additions, substitutions, and/or deletions. In some embodiments, a nucleic acid or a portion thereof comprises greater than 70% sequence identity (e.g., 71%, 75%, 80%, 85%, 90%, 95%, 99%) with one or more of the nucleic acids of Table 1.

[0198] In some embodiments, non-luminescent polypeptides that find use in embodiments of the present invention include polypeptides with one or more amino acid substitutions, deletions, or additions from SEQ ID NO: 440. In some embodiments, the present invention provides polypeptides comprising one or more of amino acid sequences of Table 2, and/or nucleic acids comprising the nucleic acid sequences of Table 2 (which code for the polypeptide sequences of Table 2).

TABLE 2
Polypeptide sequences

| SEQ ID NO | Polymer | ID |
|---|---|---|
| 441 | N.A. | R11N |
| 442 | A.A | R11N |
| 443 | N.A. | T13I |
| 444 | A.A | T13I |
| 445 | N.A. | G15S |
| 446 | A.A | G15S |
| 447 | N.A. | L18Q |
| 448 | A.A | L18Q |
| 449 | N.A. | Q20K |
| 450 | A.A | Q20K |
| 451 | N.A. | V27M |
| 452 | A.A | V27M |
| 453 | N.A. | F31I |
| 454 | A.A | F31I |
| 455 | N.A. | F31L |
| 456 | A.A | F31L |
| 457 | N.A. | F31V |
| 458 | A.A | F31V |
| 459 | N.A. | Q32R |
| 460 | A.A | Q32R |
| 461 | N.A. | N33K |
| 462 | A.A | N33K |
| 463 | N.A. | N33R |
| 464 | A.A | N33R |
| 465 | N.A. | I56N |
| 466 | A.A | I56N |
| 467 | N.A. | V58A |
| 468 | A.A | V58A |
| 469 | N.A. | I59T |
| 470 | A.A | I59T |
| 471 | N.A. | G67S |
| 472 | A.A | G67S |
| 473 | N.A. | G67D |
| 474 | A.A | G67D |
| 475 | N.A. | K75E |
| 476 | A.A | K75E |
| 477 | N.A. | M106V |
| 478 | A.A | M106V |
| 479 | N.A. | M106I |
| 480 | A.A | M106I |
| 481 | N.A. | D108N |
| 482 | A.A | D108N |
| 483 | N.A. | R112Q |
| 484 | A.A | R112Q |
| 485 | N.A. | N144T |
| 486 | A.A | N144T |
| 487 | N.A. | L149M |
| 488 | A.A | L149M |
| 489 | N.A. | N156D |
| 490 | A.A | N156D |
| 491 | N.A. | N156S |
| 492 | A.A | N156S |
| 493 | N.A. | V157D |
| 494 | A.A | V157D |
| 495 | N.A. | V157S |
| 496 | A.A | V157S |
| 497 | N.A. | G8A |
| 498 | A.A | G8A |
| 499 | N.A. | G15A |
| 500 | A.A | G15A |
| 501 | N.A. | G25A |
| 502 | A.A | G25A |
| 503 | N.A. | G26A |
| 504 | A.A | G26A |
| 505 | N.A. | G35A |
| 506 | A.A | G35A |
| 507 | N.A. | G48A |
| 508 | A.A | G48A |
| 509 | N.A. | G51A |
| 510 | A.A | G51A |
| 511 | N.A. | G64A |
| 512 | A.A | G64A |
| 513 | N.A. | G67A |
| 514 | A.A | G67A |
| 515 | N.A. | G71A |
| 516 | A.A | G71A |
| 517 | N.A. | G95A |
| 518 | A.A | G95A |
| 519 | N.A. | G101A |
| 520 | A.A | G101A |
| 521 | N.A. | G111A |
| 522 | A.A | G111A |
| 523 | N.A. | G116A |
| 524 | A.A | G116A |
| 525 | N.A. | G122A |
| 526 | A.A | G122A |
| 527 | N.A. | G129A |
| 528 | A.A | G129A |
| 529 | N.A. | G134A |
| 530 | A.A | G134A |
| 531 | N.A. | G147A |
| 532 | A.A | G147A |
| 533 | N.A. | I54A |
| 534 | A.A | I54A |
| 535 | N.A. | 5A1 (G15A/D19A/G35A/G51A/G67A) |
| 536 | A.A | 5A1 (G15A/D19A/G35A/G51A/G67A) |
| 537 | N.A. | 4A1 (G15A/G35A/G67A/G71A) |
| 538 | A.A | 4A1 (G15A/G35A/G67A/G71A) |
| 539 | N.A. | 5A2 (G15A/G35A/G51A/G67A/G71A) |
| 540 | A.A | 5A2 (G15A/G35A/G51A/G67A/G71A) |
| 541 | N.A. | 5A2 + A15G |
| 542 | A.A | 5A2 + A15G |
| 543 | N.A. | 5A2 + A35G |
| 544 | A.A | 5A2 + A35G |
| 545 | N.A. | 5A2 + A51G |
| 546 | A.A | 5A2 + A51G |
| 547 | N.A. | 5A2 + A67G |
| 548 | A.A | 5A2 + A67G |
| 549 | N.A. | 5A2 + A71G |
| 550 | A.A | 5A2 + A71G |
| 551 | N.A. | 5A2 + R11A |
| 552 | A.A | 5A2 + R11A |
| 553 | N.A. | 5A2 + R11C |
| 554 | A.A | 5A2 + R11C |
| 555 | N.A. | 5A2 + R11D |
| 556 | A.A | 5A2 + R11D |
| 557 | N.A. | 5A2 + R11E |
| 558 | A.A | 5A2 + R11E |
| 559 | N.A. | 5A2 + R11F |
| 560 | A.A | 5A2 + R11F |
| 561 | N.A. | 5A2 + R11G |
| 562 | A.A | 5A2 + R11G |
| 563 | N.A. | 5A2 + R11H |
| 564 | A.A | 5A2 + R11H |
| 565 | N.A. | 5A2 + R11I |
| 566 | A.A | 5A2 + R11I |
| 567 | N.A. | 5A2 + R11K |
| 568 | A.A | 5A2 + R11K |
| 569 | N.A. | 5A2 + R11L |
| 570 | A.A | 5A2 + R11L |
| 571 | N.A. | 5A2 + R11M |
| 572 | A.A | 5A2 + R11M |
| 573 | N.A. | 5A2 + R11N |
| 574 | A.A | 5A2 + R11N |
| 575 | N.A. | 5A2 + R11P |
| 576 | A.A | 5A2 + R11P |
| 577 | N.A. | 5A2 + R11Q |
| 578 | A.A | 5A2 + R11Q |
| 579 | N.A. | 5A2 + R11S |
| 580 | A.A | 5A2 + R11S |
| 581 | N.A. | 5A2 + R11T |
| 582 | A.A | 5A2 + R11T |
| 583 | N.A. | 5A2 + R11V |
| 584 | A.A | 5A2 + R11V |
| 585 | N.A. | 5A2 + R11W |
| 586 | A.A | 5A2 + R11W |
| 587 | N.A. | 5A2 + R11Y |
| 588 | A.A | 5A2 + R11Y |
| 589 | N.A. | 5A2 + A15C |
| 590 | A.A | 5A2 + A15C |
| 591 | N.A. | 5A2 + A15D |
| 592 | A.A | 5A2 + A15D |
| 593 | N.A. | 5A2 + A15E |
| 594 | A.A | 5A2 + A15E |
| 595 | N.A. | 5A2 + A15F |
| 596 | A.A | 5A2 + A15F |
| 597 | N.A. | 5A2 + A15G |
| 598 | A.A | 5A2 + A15G |
| 599 | N.A. | 5A2 + A15H |
| 600 | A.A | 5A2 + A15H |
| 601 | N.A. | 5A2 + A15I |
| 602 | A.A | 5A2 + A15I |
| 603 | N.A. | 5A2 + A15K |
| 604 | A.A | 5A2 + A15K |
| 605 | N.A. | 5A2 + A15L |
| 606 | A.A | 5A2 + A15L |
| 607 | N.A. | 5A2 + A15M |
| 608 | A.A | 5A2 + A15M |
| 609 | N.A. | 5A2 + A15N |
| 610 | A.A | 5A2 + A15N |
| 611 | N.A. | 5A2 + A15P |
| 612 | A.A | 5A2 + A15P |
| 613 | N.A. | 5A2 + A15Q |
| 614 | A.A | 5A2 + A15Q |
| 615 | N.A. | 5A2 + A15R |
| 616 | A.A | 5A2 + A15R |
| 617 | N.A. | 5A2 + A15S |
| 618 | A.A | 5A2 + A15S |
| 619 | N.A. | 5A2 + A15T |
| 620 | A.A | 5A2 + A15T |
| 621 | N.A. | 5A2 + A15V |
| 622 | A.A | 5A2 + A15V |
| 623 | N.A. | 5A2 + A15W |
| 624 | A.A | 5A2 + A15W |
| 625 | N.A. | 5A2 + A15Y |
| 626 | A.A | 5A2 + A15Y |
| 627 | N.A. | 5A2 + L18A |
| 628 | A.A | 5A2 + L18A |
| 629 | N.A. | 5A2 + L18C |
| 630 | A.A | 5A2 + L18C |
| 631 | N.A. | 5A2 + L18D |
| 632 | A.A | 5A2 + L18D |
| 633 | N.A. | 5A2 + L18E |
| 634 | A.A | 5A2 + L18E |
| 635 | N.A. | 5A2 + L18F |
| 636 | A.A | 5A2 + L18F |
| 637 | N.A. | 5A2 + L18G |
| 638 | A.A | 5A2 + L18G |
| 639 | N.A. | 5A2 + L18H |
| 640 | A.A | 5A2 + L18H |
| 641 | N.A. | 5A2 + L18I |
| 642 | A.A | 5A2 + L18I |
| 643 | N.A. | 5A2 + L18K |
| 644 | A.A | 5A2 + L18K |
| 645 | N.A. | 5A2 + L18M |
| 646 | A.A | 5A2 + L18M |
| 647 | N.A. | 5A2 + L18N |
| 648 | A.A | 5A2 + L18N |
| 649 | N.A. | 5A2 + L18P |
| 650 | A.A | 5A2 + L18P |
| 651 | N.A. | 5A2 + L18Q |
| 652 | A.A | 5A2 + L18Q |
| 653 | N.A. | 5A2 + L18R |
| 654 | A.A | 5A2 + L18R |
| 655 | N.A. | 5A2 + L18S |
| 656 | A.A | 5A2 + L18S |
| 657 | N.A. | 5A2 + L18T |
| 658 | A.A | 5A2 + L18T |
| 659 | N.A. | 5A2 + L18V |
| 660 | A.A | 5A2 + L18V |
| 661 | N.A. | 5A2 + L18W |
| 662 | A.A | 5A2 + L18W |
| 663 | N.A. | 5A2 + L18Y |
| 664 | A.A | 5A2 + L18Y |
| 665 | N.A. | 5A2 + F31A |
| 666 | A.A | 5A2 + F31A |
| 667 | N.A. | 5A2 + F31C |
| 668 | A.A | 5A2 + F31C |
| 669 | N.A. | 5A2 + F31D |
| 670 | A.A | 5A2 + F31D |
| 671 | N.A. | 5A2 + F31E |
| 672 | A.A | 5A2 + F31E |
| 673 | N.A. | 5A2 + F31G |
| 674 | A.A | 5A2 + F31G |
| 675 | N.A. | 5A2 + F31H |
| 676 | A.A | 5A2 + F31H |
| 677 | N.A. | 5A2 + F31I |
| 678 | A.A | 5A2 + F31I |
| 679 | N.A. | 5A2 + F31K |
| 680 | A.A | 5A2 + F31K |
| 681 | N.A. | 5A2 + F31L |
| 682 | A.A | 5A2 + F31L |
| 683 | N.A. | 5A2 + F31M |
| 684 | A.A | 5A2 + F31M |
| 685 | N.A. | 5A2 + F31N |
| 686 | A.A | 5A2 + F31N |
| 687 | N.A. | 5A2 + F31P |
| 688 | A.A | 5A2 + F31P |
| 689 | N.A. | 5A2 + F31Q |
| 690 | A.A | 5A2 + F31Q |
| 691 | N.A. | 5A2 + F31R |
| 692 | A.A | 5A2 + F31R |
| 693 | N.A. | 5A2 + F31S |
| 694 | A.A | 5A2 + F31S |
| 695 | N.A. | 5A2 + F31T |
| 696 | A.A | 5A2 + F31T |
| 697 | N.A. | 5A2 + F31V |
| 698 | A.A | 5A2 + F31V |
| 699 | N.A. | 5A2 + F31W |
| 700 | A.A | 5A2 + F31W |
| 701 | N.A. | 5A2 + F31Y |
| 702 | A.A | 5A2 + F31Y |
| 703 | N.A. | 5A2 + V58A |
| 704 | A.A | 5A2 + V58A |
| 705 | N.A. | 5A2 + V58C |
| 706 | A.A | 5A2 + V58C |
| 707 | N.A. | 5A2 + V58D |
| 708 | A.A | 5A2 + V58D |
| 709 | N.A. | 5A2 + V58E |
| 710 | A.A | 5A2 + V58E |
| 711 | N.A. | 5A2 + V58F |
| 712 | A.A | 5A2 + V58F |
| 713 | N.A. | 5A2 + V58G |
| 714 | A.A | 5A2 + V58G |
| 715 | N.A. | 5A2 + V58H |
| 716 | A.A | 5A2 + V58H |
| 717 | N.A. | 5A2 + V58I |
| 718 | A.A | 5A2 + V58I |
| 719 | N.A. | 5A2 + V58K |
| 720 | A.A | 5A2 + V58K |
| 721 | N.A. | 5A2 + V58L |
| 722 | A.A | 5A2 + V58L |
| 723 | N.A. | 5A2 + V58M |
| 724 | A.A | 5A2 + V58M |
| 725 | N.A. | 5A2 + V58N |
| 726 | A.A | 5A2 + V58N |
| 727 | N.A. | 5A2 + V58P |
| 728 | A.A | 5A2 + V58P |
| 729 | N.A. | 5A2 + V58Q |
| 730 | A.A | 5A2 + V58Q |
| 731 | N.A. | 5A2 + V58R |
| 732 | A.A | 5A2 + V58R |
| 733 | N.A. | 5A2 + V58S |
| 734 | A.A | 5A2 + V58S |
| 735 | N.A. | 5A2 + V58T |
| 736 | A.A | 5A2 + V58T |
| 737 | N.A. | 5A2 + V58W |
| 738 | A.A | 5A2 + V58W |
| 739 | N.A. | 5A2 + V58Y |
| 740 | A.A | 5A2 + V58Y |
| 741 | N.A. | 5A2 + A67C |
| 742 | A.A | 5A2 + A67C |
| 743 | N.A. | 5A2 + A67D |
| 744 | A.A | 5A2 + A67D |
| 745 | N.A. | 5A2 + A67E |
| 746 | A.A | 5A2 + A67E |
| 747 | N.A. | 5A2 + A67F |
| 748 | A.A | 5A2 + A67F |
| 749 | N.A. | 5A2 + A67G |
| 750 | A.A | 5A2 + A67G |
| 751 | N.A. | 5A2 + A67H |
| 752 | A.A | 5A2 + A67H |
| 753 | N.A. | 5A2 + A67I |
| 754 | A.A | 5A2 + A67I |
| 755 | N.A. | 5A2 + A67K |
| 756 | A.A | 5A2 + A67K |
| 757 | N.A. | 5A2 + A67L |
| 758 | A.A | 5A2 + A67L |
| 759 | N.A. | 5A2 + A67M |
| 760 | A.A | 5A2 + A67M |
| 761 | N.A. | 5A2 + A67N |
| 762 | A.A | 5A2 + A67N |
| 763 | N.A. | 5A2 + A67P |
| 764 | A.A | 5A2 + A67P |
| 765 | N.A. | 5A2 + A67Q |
| 766 | A.A | 5A2 + A67Q |
| 767 | N.A. | 5A2 + A67R |
| 768 | A.A | 5A2 + A67R |
| 769 | N.A. | 5A2 + A67S |
| 770 | A.A | 5A2 + A67S |
| 771 | N.A. | 5A2 + A67T |
| 772 | A.A | 5A2 + A67T |
| 773 | N.A. | 5A2 + A67V |
| 774 | A.A | 5A2 + A67V |
| 775 | N.A. | 5A2 + A67W |
| 776 | A.A | 5A2 + A67W |
| 777 | N.A. | 5A2 + A67Y |
| 778 | A.A | 5A2 + A67Y |
| 779 | N.A. | 5A2 + M106A |
| 780 | A.A | 5A2 + M106A |
| 781 | N.A. | 5A2 + M106C |
| 782 | A.A | 5A2 + M106C |
| 783 | N.A. | 5A2 + M106D |
| 784 | A.A | 5A2 + M106D |
| 785 | N.A. | 5A2 + M106E |
| 786 | A.A | 5A2 + M106E |
| 787 | N.A. | 5A2 + M106F |
| 788 | A.A | 5A2 + M106F |
| 789 | N.A. | 5A2 + M106G |
| 790 | A.A | 5A2 + M106G |
| 791 | N.A. | 5A2 + M106H |
| 792 | A.A | 5A2 + M106H |
| 793 | N.A. | 5A2 + M106I |
| 794 | A.A | 5A2 + M106I |
| 795 | N.A. | 5A2 + M106K |
| 796 | A.A | 5A2 + M106K |
| 797 | N.A. | 5A2 + M106L |
| 798 | A.A | 5A2 + M106L |
| 799 | N.A. | 5A2 + M106N |
| 800 | A.A | 5A2 + M106N |
| 801 | N.A. | 5A2 + M106P |
| 802 | A.A | 5A2 + M106P |
| 803 | N.A. | 5A2 + M106Q |
| 804 | A.A | 5A2 + M106Q |
| 805 | N.A. | 5A2 + M106R |
| 806 | A.A | 5A2 + M106R |
| 807 | N.A. | 5A2 + M106S |
| 808 | A.A | 5A2 + M106S |
| 809 | N.A. | 5A2 + M106T |
| 810 | A.A | 5A2 + M106T |
| 811 | N.A. | 5A2 + M106V |
| 812 | A.A | 5A2 + M106V |
| 813 | N.A. | 5A2 + M106W |
| 814 | A.A | 5A2 + M106W |
| 815 | N.A. | 5A2 + M106Y |
| 816 | A.A | 5A2 + M106Y |
| 817 | N.A. | 5A2 + L149A |
| 818 | A.A | 5A2 + L149A |
| 819 | N.A. | 5A2 + L149C |
| 820 | A.A | 5A2 + L149C |
| 821 | N.A. | 5A2 + L149D |
| 822 | A.A | 5A2 + L149D |
| 823 | N.A. | 5A2 + L149E |
| 824 | A.A | 5A2 + L149E |
| 825 | N.A. | 5A2 + L149F |
| 826 | A.A | 5A2 + L149F |
| 827 | N.A. | 5A2 + L149G |
| 828 | A.A | 5A2 + L149G |
| 829 | N.A. | 5A2 + L149H |
| 830 | A.A | 5A2 + L149H |
| 831 | N.A. | 5A2 + L149I |
| 832 | A.A | 5A2 + L149I |
| 833 | N.A. | 5A2 + L149K |
| 834 | A.A | 5A2 + L149K |
| 835 | N.A. | 5A2 + L149M |
| 836 | A.A | 5A2 + L149M |
| 837 | N.A. | 5A2 + L149N |
| 838 | A.A | 5A2 + L149N |
| 839 | N.A. | 5A2 + L149P |
| 840 | A.A | 5A2 + L149P |
| 841 | N.A. | 5A2 + L149Q |
| 842 | A.A | 5A2 + L149Q |
| 843 | N.A. | 5A2 + L149R |
| 844 | A.A | 5A2 + L149R |
| 845 | N.A. | 5A2 + L149S |
| 846 | A.A | 5A2 + L149S |
| 847 | N.A. | 5A2 + L149T |
| 848 | A.A | 5A2 + L149T |
| 849 | N.A. | 5A2 + L149V |
| 850 | A.A | 5A2 + L149V |
| 851 | N.A. | 5A2 + L149W |
| 852 | A.A | 5A2 + L149W |
| 853 | N.A. | 5A2 + L149Y |
| 854 | A.A | 5A2 + L149Y |
| 855 | N.A. | 5A2 + V157A |
| 856 | A.A | 5A2 + V157A |
| 857 | N.A. | 5A2 + V157C |
| 858 | A.A | 5A2 + V157C |
| 859 | N.A. | 5A2 + V157D |
| 860 | A.A | 5A2 + V157D |
| 861 | N.A. | 5A2 + V157E |
| 862 | A.A | 5A2 + V157E |
| 863 | N.A. | 5A2 + V157F |
| 864 | A.A | 5A2 + V157F |
| 865 | N.A. | 5A2 + V157G |
| 866 | A.A | 5A2 + V157G |
| 867 | N.A. | 5A2 + V157H |
| 868 | A.A | 5A2 + V157H |
| 869 | N.A. | 5A2 + V157I |
| 870 | A.A | 5A2 + V157I |
| 871 | N.A. | 5A2 + V157K |
| 872 | A.A | 5A2 + V157K |
| 873 | N.A. | 5A2 + V157L |
| 874 | A.A | 5A2 + V157L |
| 875 | N.A. | 5A2 + V157M |
| 876 | A.A | 5A2 + V157M |
| 877 | N.A. | 5A2 + V157N |
| 878 | A.A | 5A2 + V157N |
| 879 | N.A. | 5A2 + V157P |
| 880 | A.A | 5A2 + V157P |
| 881 | N.A. | 5A2 + V157Q |
| 882 | A.A | 5A2 + V157Q |
| 883 | N.A. | 5A2 + V157R |
| 884 | A.A | 5A2 + V157R |
| 885 | N.A. | 5A2 + V157S |
| 886 | A.A | 5A2 + V157S |
| 887 | N.A. | 5A2 + V157T |
| 888 | A.A | 5A2 + V157T |
| 889 | N.A. | 5A2 + V157W |
| 890 | A.A | 5A2 + V157W |
| 891 | N.A. | 5A2 + V157Y |
| 892 | A.A | 5A2 + V157Y |
| 893 | N.A. | 5A2 + Q20K |
| 894 | A.A | 5A2 + Q20K |
| 895 | N.A. | 5A2 + V27M |
| 896 | A.A | 5A2 + V27M |
| 897 | N.A. | 5A2 + N33K |
| 898 | A.A | 5A2 + N33K |
| 899 | N.A. | 5A2 + V38I |
| 900 | A.A | 5A2 + V38I |
| 901 | N.A. | 5A2 + I56N |
| 902 | A.A | 5A2 + I56N |
| 903 | N.A. | 5A2 + D108N |
| 904 | A.A | 5A2 + D108N |
| 905 | N.A. | 5A2 + N144T |
| 906 | A.A | 5A2 + N144T |
| 907 | N.A. | 5A2 + V27M + A35G |
| 908 | A.A | 5A2 + V27M + A35G |
| 909 | N.A. | 5A2 + A71G + K75E |
| 910 | A.A | 5A2 + A71G + K75E |
| 911 | N.A. | 5A2 + R11E + L149M |
| 912 | A.A | 5A2 + R11E + L149M |
| 913 | N.A. | 5A2 + R11E + V157P |
| 914 | A.A | 5A2 + R11E + V157P |
| 915 | N.A. | 5A2 + D108N + N144T |
| 916 | A.A | 5A2 + D108N + N144T |
| 917 | N.A. | 5A2 + L149M + V157D |
| 918 | A.A | 5A2 + L149M + V157D |
| 919 | N.A. | 5A2 + L149M + V157P |
| 920 | A.A | 5A2 + L149M + V157P |
| 921 | N.A. | 3P (5A2 + R11E + L149M + V157P) |
| 922 | A.A | 3P (5A2 + R11E + L149M + V157P) |
| 923 | N.A. | 3P + D108N |
| 924 | A.A | 3P + D108N |
| 925 | N.A. | 3P + N144T |
| 926 | A.A | 3P + N144T |
| 927 | N.A. | 3E (5A2 + R11E + L149M + V157E) |
| 928 | A.A | 3E (5A2 + R11E + L149M + V157E) |
| 929 | N.A. | 3E + D108N |
| 930 | A.A | 3E + D108N |
| 931 | N.A. | 3E + N144T |
| 932 | A.A | 3E + N144T |
| 933 | N.A. | 5P (3P + D108N + N144T) |
| 934 | A.A | 5P (3P + D108N + N144T) |
| 935 | N.A. | 6P (5P + I56N) |
| 936 | A.A | 6P (5P + I56N) |
| 937 | N.A. | 5E (3E + D108N + N144T) |
| 938 | A.A | 5E (3E + D108N + N144T) |
| 939 | N.A. | 6E (5E + I56N) |
| 940 | A.A | 6E (5E + I56N) |
| 941 | N.A. | NLpoly1 (5A2 + R11N + A15S + L18Q + F31I + |
| | | V58A + A67D + M106V + L149M + V157D) |
| 942 | A.A | NLpoly1 (5A2 + R11N + A15S + L18Q + F31I + |
| | | V58A + A67D + M106V + L149M + V157D) |
| 943 | N.A. | NLpoly2 (5A2 + A15S + L18Q + F31I + V58A + |
| | | A67D + M106V + L149M + V157D) |
| 944 | A.A | NLpoly2 (5A2 + A15S + L18Q + F31I + V58A + |
| | | A67D + M106V + L149M + V157D) |
| 945 | N.A. | NLpoly3 (5A2 + R11N + L18Q + F31I + |
| | | V58A + A67D + M106V + L149M + V157D) |
| 946 | A.A | NLpoly3 (5A2 + R11N + L18Q + F31I + |
| | | V58A + A67D + M106V + L149M + V157D) |
| 947 | N.A. | NLpoly4 (5A2 + R11N + A15S + F31I + |
| | | V58A + A67D + M106V + L149M + V157D) |
| 948 | A.A | NLpoly4 (5A2 + R11N + A15S + F31I + |
| | | V58A + A67D + M106V + L149M + V157D) |
| 949 | N.A. | NLpoly5 (5A2 + R11N + A15S + L18Q + |
| | | V58A + A67D + M106V + L149M + V157D) |
| 950 | A.A | NLpoly5 (5A2 + R11N + A15S + L18Q + |
| | | V58A + A67D + M106V + L149M + V157D) |
| 951 | N.A. | NLpoly6 (5A2 + R11N + A15S + L18Q + F31I + |
| | | A67D + M106V + L149M + V157D) |
| 952 | A.A | NLpoly6 (5A2 + R11N + A15S + L18Q + F31I + |
| | | A67D + M106V + L149M + V157D) |
| 953 | N.A. | NLpoly7 (5A2 + R11N + A15S + L18Q + F31I + |
| | | V58A + M106V + L149M + V157D) |
| 954 | A.A | NLpoly7 (5A2 + R11N + A15S + L18Q + F31I + |
| | | V58A + M106V + L149M + V157D) |
| 955 | N.A. | NLpoly8 (5A2 + R11N + A15S + L18Q + F31I + |
| | | V58A + A67D + L149M + V157D) |
| 956 | A.A | NLpoly8 (5A2 + R11N + A15S + L18Q + F31I + |
| | | V58A + A67D + L149M + V157D) |
| 957 | N.A. | NLpoly9 (5A2 + R11N + A15S + L18Q + F31I + |
| | | V58A + A67D + M106V + V157D) |
| 958 | A.A | NLpoly9 (5A2 + R11N + A15S + L18Q + F31I + |
| | | V58A + A67D + M106V + V157D) |
| 959 | N.A. | NLpoly10 (5A2 + R11N + A15S + L18Q + |
| | | F31I + V58A + A67D + M106V + L149M) |
| 960 | A.A | NLpoly10 (5A2 + R11N + A15S + L18Q + |
| | | F31I + V58A + A67D + M106V + L149M) |
| 961 | N.A. | NLpoly11 (5A2 + A15S + L18Q + M106V + |
| | | L149M + V157D) |
| 962 | A.A | NLpoly11 (5A2 + A15S + L18Q + M106V + |
| | | L149M + V157D) |
| 963 | N.A. | NLpoly12 (5A2 + A15S + L18Q + A67D + |
| | | M106V + L149M + V157D) |
| 964 | A.A | NLpoly12 (5A2 + A15S + L18Q + A67D + |
| | | M106V + L149M + V157D) |
| 965 | N.A. | NLpoly13 (5A2 + R11N + A15S + L18Q + |
| | | M106V + L149M + V157D) |
| 966 | A.A | NLpoly13 (5A2 + R11N + A15S + L18Q + |
| | | M106V + L149M + V157D) |
| 967 | N.A. | 5P + V |
| 968 | A.A | 5P + V |
| 969 | N.A. | 5P + A |
| 970 | A.A | 5P + A |
| 971 | N.A. | 5P + VT |
| 972 | A.A | 5P + VT |
| 973 | N.A. | 5P + VA |
| 974 | A.A | 5P + VA |
| 975 | N.A. | 5P + AT |
| 976 | A.A | 5P + AT |
| 977 | N.A. | 5P + AA |
| 978 | A.A | 5P + AA |
| 979 | N.A. | 5P + GG |
| 980 | A.A | 5P + GG |
| 981 | N.A. | 5P + AA |
| 982 | A.A | 5P + AA |
| 983 | N.A. | 5P + ATG |
| 984 | A.A | 5P + ATG |
| 985 | N.A. | 5P + VTG |
| 986 | A.A | 5P + VTG |
| 987 | N.A. | 5P + VTA |
| 988 | A.A | 5P + VTA |
| 989 | N.A. | 5P + GTA |
| 990 | A.A | 5P + GTA |
| 991 | N.A. | 5P + VTGW |
| 992 | A.A | 5P + VTGW |
| 993 | N.A. | 5P + VTGWR |
| 994 | A.A | 5P + VTGWR |
| 995 | N.A. | 5P + VTGWE |
| 996 | A.A | 5P + VTGWE |
| 997 | N.A. | 5P + VTGWK |
| 998 | A.A | 5P + VTGWK |
| 999 | N.A. | 5P + VTGWQ |
| 1000 | A.A | 5P + VTGWQ |
| 1001 | N.A. | 5P + VTGWH |
| 1002 | A.A | 5P + VTGWH |
| 1003 | N.A. | 5P D1 (−157) |
| 1004 | A.A | 5P D1 (−157) |
| 1005 | N.A. | 5P D2 (−156-157) |
| 1006 | A.A | 5P D2 (−156-157) |
| 1007 | N.A. | 5P D3 (−155-157) |
| 1008 | A.A | 5P D3 (−155-157) |
| 1009 | N.A. | 5P D4 (−154-157) |
| 1010 | A.A | 5P D4 (−154-157) |
| 1011 | N.A. | 5P D5 (−153-157) |
| 1012 | A.A | 5P D5 (−153-157) |
| 1013 | N.A. | 5P D6 (−152-157) |
| 1014 | A.A | 5P D6 (−152-157) |
| 1015 | N.A. | 5P D7 (−151-157) |
| 1016 | A.A | 5P D7 (−151-157) |
| 1017 | N.A. | 5P + F31A |
| 1018 | A.A | 5P + F31A |
| 1019 | N.A. | 5P + F31C |
| 1020 | A.A | 5P + F31C |
| 1021 | N.A. | 5P + F31D |
| 1022 | A.A | 5P + F31D |
| 1023 | N.A. | 5P + F31E |
| 1024 | A.A | 5P + F31E |
| 1025 | N.A. | 5P + F31G |
| 1026 | A.A | 5P + F31G |
| 1027 | N.A. | 5P + F31H |
| 1028 | A.A | 5P + F31H |
| 1029 | N.A. | 5P + F31I |
| 1030 | A.A | 5P + F31I |
| 1031 | N.A. | 5P + F31K |
| 1032 | A.A | 5P + F31K |
| 1033 | N.A. | 5P + F31L |
| 1034 | A.A | 5P + F31L |
| 1035 | N.A. | 5P + F31M |
| 1036 | A.A | 5P + F31M |
| 1037 | N.A. | 5P + F31N |
| 1038 | A.A | 5P + F31N |
| 1039 | N.A. | 5P + F31P |
| 1040 | A.A | 5P + F31P |
| 1041 | N.A. | 5P + F31Q |
| 1042 | A.A | 5P + F31Q |
| 1043 | N.A. | 5P + F31R |
| 1044 | A.A | 5P + F31R |
| 1045 | N.A. | 5P + F31S |
| 1046 | A.A | 5P + F31S |
| 1047 | N.A. | 5P + F31T |
| 1048 | A.A | 5P + F31T |
| 1049 | N.A. | 5P + F31V |
| 1050 | A.A | 5P + F31V |
| 1051 | N.A. | 5P + F31W |
| 1052 | A.A | 5P + F31W |
| 1053 | N.A. | 5P + F31Y |
| 1054 | A.A | 5P + F31Y |
| 1055 | N.A. | 5P + L46A |
| 1056 | A.A | 5P + L46A |
| 1057 | N.A. | 5P + L46C |
| 1058 | A.A | 5P + L46C |
| 1059 | N.A. | 5P + L46D |
| 1060 | A.A | 5P + L46D |
| 1061 | N.A. | 5P + L46E |
| 1062 | A.A | 5P + L46E |
| 1063 | N.A. | 5P + L46F |
| 1064 | A.A | 5P + L46F |
| 1065 | N.A. | 5P + L46G |
| 1066 | A.A | 5P + L46G |
| 1067 | N.A. | 5P + L46H |
| 1068 | A.A | 5P + L46H |
| 1069 | N.A. | 5P + L46I |
| 1070 | A.A | 5P + L46I |
| 1071 | N.A. | 5P + L46K |
| 1072 | A.A | 5P + L46K |
| 1073 | N.A. | 5P + L46M |
| 1074 | A.A | 5P + L46M |
| 1075 | N.A. | 5P + L46N |
| 1076 | A.A | 5P + L46N |
| 1077 | N.A. | 5P + L46P |
| 1078 | A.A | 5P + L46P |
| 1079 | N.A. | 5P + L46Q |
| 1080 | A.A | 5P + L46Q |
| 1081 | N.A. | 5P + L46R |
| 1082 | A.A | 5P + L46R |
| 1083 | N.A. | 5P + L46S |
| 1084 | A.A | 5P + L46S |
| 1085 | N.A. | 5P + L46T |
| 1086 | A.A | 5P + L46T |
| 1087 | N.A. | 5P + L46V |
| 1088 | A.A | 5P + L46V |
| 1089 | N.A. | 5P + L46W |
| 1090 | A.A | 5P + L46W |
| 1091 | N.A. | 5P + L46Y |
| 1092 | A.A | 5P + L46Y |
| 1093 | N.A. | 5P + N108A |
| 1094 | A.A | 5P + N108A |
| 1095 | N.A. | 5P + N108C |
| 1096 | A.A | 5P + N108C |
| 1097 | N.A. | 5P + N108D |
| 1098 | A.A | 5P + N108D |
| 1099 | N.A. | 5P + N108E |
| 1100 | A.A | 5P + N108E |
| 1101 | N.A. | 5P + N108F |
| 1102 | A.A | 5P + N108F |
| 1103 | N.A. | 5P + N108G |
| 1104 | A.A | 5P + N108G |
| 1105 | N.A. | 5P + N108H |
| 1106 | A.A | 5P + N108H |
| 1107 | N.A. | 5P + N108I |
| 1108 | A.A | 5P + N108I |
| 1109 | N.A. | 5P + N108K |
| 1110 | A.A | 5P + N108K |
| 1111 | N.A. | 5P + N108L |
| 1112 | A.A | 5P + N108L |
| 1113 | N.A. | 5P + N108M |
| 1114 | A.A | 5P + N108M |
| 1115 | N.A. | 5P + N108P |
| 1116 | A.A | 5P + N108P |
| 1117 | N.A. | 5P + N108Q |
| 1118 | A.A | 5P + N108Q |
| 1119 | N.A. | 5P + N108R |
| 1120 | A.A | 5P + N108R |
| 1121 | N.A. | 5P + N108S |
| 1122 | A.A | 5P + N108S |
| 1123 | N.A. | 5P + N108T |
| 1124 | A.A | 5P + N108T |
| 1125 | N.A. | 5P + N108V |
| 1126 | A.A | 5P + N108V |
| 1127 | N.A. | 5P + N108W |
| 1128 | A.A | 5P + N108W |
| 1129 | N.A. | 5P + N108Y |
| 1130 | A.A | 5P + N108Y |
| 1131 | N.A. | 5P + T144A |
| 1132 | A.A | 5P + T144A |
| 1133 | N.A. | 5P + T144C |
| 1134 | A.A | 5P + T144C |
| 1135 | N.A. | 5P + T144D |
| 1136 | A.A | 5P + T144D |
| 1137 | N.A. | 5P + T144E |
| 1138 | A.A | 5P + T144E |
| 1139 | N.A. | 5P + T144F |
| 1140 | A.A | 5P + T144F |
| 1141 | N.A. | 5P + T144G |
| 1142 | A.A | 5P + T144G |
| 1143 | N.A. | 5P + T144H |
| 1144 | A.A | 5P + T144H |
| 1145 | N.A. | 5P + T144I |
| 1146 | A.A | 5P + T144I |
| 1147 | N.A. | 5P + T144K |
| 1148 | A.A | 5P + T144K |
| 1149 | N.A. | 5P + T144L |
| 1150 | A.A | 5P + T144L |
| 1151 | N.A. | 5P + T144M |
| 1152 | A.A | 5P + T144M |
| 1153 | N.A. | 5P + T144N |
| 1154 | A.A | 5P + T144N |
| 1155 | N.A. | 5P + T144P |
| 1156 | A.A | 5P + T144P |
| 1157 | N.A. | 5P + T144Q |
| 1158 | A.A | 5P + T144Q |
| 1159 | N.A. | 5P + T144R |
| 1160 | A.A | 5P + T144R |
| 1161 | N.A. | 5P + T144S |
| 1440 | A.A | 5P + T144S |
| 1163 | N.A. | 5P + T144V |
| 1164 | A.A | 5P + T144V |
| 1165 | N.A. | 5P + T144W |
| 1166 | A.A | 5P + T144W |
| 1167 | N.A. | 5P + T144Y |
| 1168 | A.A | 5P + T144Y |
| 1169 | N.A. | 5P + P157A |
| 1170 | A.A | 5P + P157A |
| 1171 | N.A. | 5P + P157C |
| 1172 | A.A | 5P + P157C |
| 1173 | N.A. | 5P + P157D |
| 1174 | A.A | 5P + P157D |
| 1175 | N.A. | 5P + P157E |
| 1176 | A.A | 5P + P157E |
| 1177 | N.A. | 5P + P157F |
| 1178 | A.A | 5P + P157F |
| 1179 | N.A. | 5P + P157G |
| 1180 | A.A | 5P + P157G |
| 1181 | N.A. | 5P + P157H |
| 1182 | A.A | 5P + P157H |
| 1183 | N.A. | 5P + P157I |
| 1184 | A.A | 5P + P157I |
| 1185 | N.A. | 5P + P157K |
| 1186 | A.A | 5P + P157K |
| 1187 | N.A. | 5P + P157L |
| 1188 | A.A | 5P + P157L |
| 1189 | N.A. | 5P + P157M |
| 1190 | A.A | 5P + P157M |
| 1191 | N.A. | 5P + P157N |
| 1192 | A.A | 5P + P157N |
| 1193 | N.A. | 5P + P157Q |
| 1194 | A.A | 5P + P157Q |
| 1195 | N.A. | 5P + P157R |
| 1196 | A.A | 5P + P157R |
| 1197 | N.A. | 5P + P157S |
| 1198 | A.A | 5P + P157S |
| 1199 | N.A. | 5P + P157T |
| 1200 | A.A | 5P + P157T |
| 1201 | N.A. | 5P + P157V |
| 1202 | A.A | 5P + P157V |
| 1203 | N.A. | 5P + P157W |
| 1204 | A.A | 5P + P157W |
| 1205 | N.A. | 5P + P157Y |
| 1206 | A.A | 5P + P157Y |
| 1207 | N.A. | 5P + I107L |
| 1208 | A.A | 5P + I107L |
| 1209 | N.A. | 5P + K75E |
| 1210 | A.A | 5P + K75E |
| 1211 | N.A. | 5P + K123E + N156D |
| 1212 | A.A | 5P + K123E + N156D |
| 1213 | N.A. | 5P + I76V |
| 1214 | A.A | 5P + I76V |
| 1215 | N.A. | 5P + G48D + H57R + L92M + I99V |
| 1216 | A.A | 5P + G48D + H57R + L92M + I99V |
| 1217 | N.A. | 5P + F31L + V36A + I99V |
| 1218 | A.A | 5P + F31L + V36A + I99V |
| 1219 | N.A. | 5P + F31L + H93P |
| 1220 | A.A | 5P + F31L + H93P |
| 1221 | N.A. | 5P + V90A |
| 1222 | A.A | 5P + V90A |
| 1223 | N.A. | 5P + I44V |
| 1224 | A.A | 5P + I44V |
| 1225 | N.A. | 5P + L46R + H86Q + M106V |
| 1226 | A.A | 5P + L46R + H86Q + M106V |
| 1227 | N.A. | 5P + R141H |
| 1228 | A.A | 5P + R141H |
| 1229 | N.A. | 5P + N33D + V58A |
| 1230 | A.A | 5P + N33D + V58A |
| 1231 | N.A. | 5P + I56N + P157H |
| 1232 | A.A | 5P + I56N + P157H |
| 1233 | N.A. | 5P + L46Q + P157H |
| 1234 | A.A | 5P + L46Q + P157H |
| 1235 | N.A. | 5P + I59V |
| 1236 | A.A | 5P + I59V |
| 1237 | N.A. | 5P + A51T + E74K + P113L |
| 1238 | A.A | 5P + A51T + E74K + P113L |
| 1239 | N.A. | 5P + V36A |
| 1240 | A.A | 5P + V36A |
| 1241 | N.A. | 5P + A51T |
| 1242 | A.A | 5P + A51T |
| 1243 | N.A. | 5P + H57R |
| 1244 | A.A | 5P + H57R |
| 1245 | N.A. | 5P + V58A |
| 1246 | A.A | 5P + V58A |
| 1247 | N.A. | 5P + E74K |
| 1248 | A.A | 5P + E74K |
| 1249 | N.A. | 5P + H86Q |
| 1250 | A.A | 5P + H86Q |
| 1251 | N.A. | 5P + H93P |
| 1252 | A.A | 5P + H93P |
| 1253 | N.A. | 5P + I99V |
| 1254 | A.A | 5P + I99V |
| 1255 | N.A. | 5P + K123E |
| 1256 | A.A | 5P + K123E |
| 1257 | N.A. | 5P + T128S |
| 1258 | A.A | 5P + T128S |
| 1259 | N.A. | 5P + L142Q + T154N |
| 1260 | A.A | 5P + L142Q + T154N |
| 1261 | N.A. | 5P + H57Q |
| 1262 | A.A | 5P + H57Q |
| 1263 | N.A. | 5P + L92M |
| 1264 | A.A | 5P + L92M |
| 1265 | N.A. | 5P + P113L |
| 1266 | A.A | 5P + P113L |
| 1267 | N.A. | 5P + G48D |
| 1268 | A.A | 5P + G48D |
| 1269 | N.A. | 5P − B9 (−147-157) |
| 1270 | A.A | 5P − B9 (−147-157) |
| 1271 | N.A. | 5P + L46R + P157S |
| 1272 | A.A | 5P + L46R + P157S |
| 1273 | N.A. | 5P + L46H + P157H |
| 1274 | A.A | 5P + L46H + P157H |
| 1275 | N.A. | 5P + L46R + H93P |
| 1276 | A.A | 5P + L46R + H93P |
| 1277 | N.A. | 5P + L46R + H93P + F31L |
| 1278 | A.A | 5P + L46R + H93P + F31L |
| 1279 | N.A. | 5P + L46R + H93P + K75E |
| 1280 | A.A | 5P + L46R + H93P + K75E |
| 1281 | N.A. | 5P + L46R + H93P + I76V |
| 1282 | A.A | 5P + L46R + H93P + I76V |
| 1283 | N.A. | 8S (5P + L46R + H93P + P157S + F31L) |
| 1284 | A.A | 8S (5P + L46R + H93P + P157S + F31L) |
| 1285 | N.A. | 5P + L46R + H93P + P157S + K75E |
| 1286 | A.A | 5P + L46R + H93P + P157S + K75E |
| 1287 | N.A. | 5P + L46R + H93P + P157S + I76V |
| 1288 | A.A | 5P + L46R + H93P + P157S + I76V |
| 1289 | N.A. | 12S (8S + A51T + K75E + I76V + I107L) |
| 1290 | A.A | 12S (8S + A51T + K75E + I76V + I107L) |
| 1291 | N.A. | 11S (12-A51T) |
| 1292 | A.A | 11S (12-A51T) |
| 1293 | N.A. | 12S-K75E |
| 1294 | A.A | 12S-K75E |
| 1295 | N.A. | 12S-I76V |
| 1296 | A.A | 12S-I76V |
| 1297 | N.A. | 12S-I107L |
| 1298 | A.A | 12S-I107L |

[0199] The polypeptides and coding nucleic acid sequences of Table 2 (SEQ ID NOS: 441-1298) all contain N-terminal Met residues (amino acids) or ATG start codons (nucleic acids). In some embodiments, the polypeptides and coding nucleic acid sequences of Table 2 are provided without N-terminal Met residues or ATG start codons (SEQ ID NOS: 1299-2156).

[0200] In certain embodiments, a polypeptide of one of the amino acid polymers of SEQ ID NOS: 441-2156 is provided. In some embodiments, polypeptides comprise a single amino acid difference from SEQ ID NO: 440. In some embodiments, polypeptides comprise two or more (e.g., 2, 3, 4, 5, 6, 7, 8, 9, 10, 11, 12, 13, 14, 15, 16, 17, 18, 19, 20, 21, 22, 23, 24, 25, 26, 27, 28, 29, 30 . . . 35 . . . 40 . . . 45 . . . 50, or more) amino acid differences from SEQ ID NO: 440 and/or any of the amino acid polymers of SEQ ID NOS:441-2156. In some embodiments, polypeptides are provided comprising the sequence of one of the amino acid polymers of SEQ ID NOS: 441-2156 with one or more additions, substitutions, and/or deletions. In some embodiments, a polypeptide or a portion thereof comprises greater than 70% sequence identity (e.g., >71%, >75%, >80%, >85%, >90%, >91%, >92%, >93%, >94%, >95%, >96%, >97%, >98%, or >99%) with one or more of the amino acid polymers of SEQ ID NOS: 441-2156.

[0201] In certain embodiments, a nucleic acid from Table 2 is provided. In some embodiments, a nucleic acid encoding a polypeptide from Table 2 is provided. In some embodiments, a nucleic acid of the present invention codes for a polypeptide that comprises a single amino acid difference from SEQ ID NO: 440 and/or any of the amino acid polymers of SEQ ID NOS: 441-2156. In some embodiments, nucleic acids code for a polypeptide comprising two or more (e.g., 2, 3, 4, 5, 6, 7, 8, 9, 10, 11, 12, 13, 14, 15, 16, 17, 18, 19, 20, 21, 22, 23, 24, 25, 26, 27, 28, 29, 30 . . . 35 . . . 40 . . . 45 . . . 50, or more) amino acid differences from SEQ ID NO: 440 and/or any of the polypeptides listed in Table 2. In some embodiments, nucleic acids are provided comprising the sequence of one of the nucleic acid polymers of SEQ ID NOS: 441-2156. In some embodiments, nucleic acids are provided comprising the sequence of one of the nucleic acid polymers of SEQ ID NOS: 441-2156 with one or more additions, substitutions, and/or deletions. In some embodiments, a nucleic acid or a portion thereof comprises greater than 70% sequence identity (e.g., >71%, >75%, >80%, >85%, >90%, >91%, >92%, >93%, >94%, >95%, >96%, >97%, >98%, or >99%) with one or more of the nucleic acid polymers of SEQ ID NOS: 441-2156. In some embodiments, a nucleic acid or a portion thereof codes for an polypeptide comprising greater than 70% sequence identity (e.g., >71%, >75%, >80%, >85%, >90%, >91%, >92%, >93%, >94%, >95%, >96%, >97%, >98%, or >99%) with one or more of the amino acid polymers of SEQ ID NOS: 441-2156. In some embodiments, nucleic acids are provided that code for one of the polypeptides of SEQ ID NOS: 441-2156. In some embodiments, nucleic acids are provided that code for one of the polypeptides of SEQ ID NOS: 441-2156 with one or more additions, substitutions, and/or deletions.

[0202] In some embodiments, a non-luminescent peptide or polypeptide and/or an interaction element, comprises a synthetic peptide, peptide containing one or more non-natural amino acids, peptide mimetic, conjugated synthetic peptide (e.g., conjugated to a functional group (e.g., fluorophore, luminescent substrate, etc.)).

[0203] The present invention provides compositions and methods that are useful in a variety of fields including basic research, medical research, molecular diagnostics, etc. Although the reagents and assays described herein are not limited to any particular applications, and any useful application should be viewed as being within the scope of the present invention, the following are exemplary assays, kits, fields, experimental set-ups, etc. that make use of the presently claimed invention.

[0204] Typical applications that make use of embodiments of the present invention involve the monitoring/detection of protein dimerization (e.g., heterodimers, homodimers), protein-protein interactions, protein-RNA interactions, protein-DNA interactions, nucleic acid hybridization, protein-small molecule interactions, or any other combinations of molecular entities. A first entity of interest is attached to a first member of a non-luminescent pair and the second entity of interest is attached to the second member of a non-luminescent pair. If a detectable signal is produced under the particular assay conditions, then interaction of the first and second entities are inferred. Such assays are useful for monitoring molecular interactions under any suitable conditions (e.g., in vitro, in vivo, in situ, whole animal, etc.), and find use in, for example, drug discovery, elucidating molecular pathways, studying equilibrium or kinetic aspects of complex assembly, high throughput screening, proximity sensor, etc.

[0205] In some embodiments, a non-luminescent pair of known characteristics (e.g., spectral characteristics, mutual affinity of pair) is used to elucidate the affinity of, or understand the interaction of, an interaction pair of interest. In other embodiments, a well-characterized interaction pair is used to determine the characteristics (e.g., spectral characteristics, mutual affinity of pair) of a non-luminescent pair.

[0206] Embodiments described herein may find use in drug screening and/or drug development. For example, the interaction of a small molecule drug or an entire library of small molecules with a target protein of interest (e.g., therapeutic target) is monitored under one or more relevant conditions (e.g., physiological conditions, disease conditions, etc.). In other embodiments, the ability of a small molecule drug or an entire library of small molecules to enhance or inhibit the interactions between two entities (e.g., receptor and ligand, protein-protein, etc.) is assayed. In some embodiments, drug screening applications are carried out in a high through-put format to allow for the detection of the binding of tens of thousands of different molecules to a target, or to test the effect of those molecules on the binding of other entities.

[0207] In some embodiments, the present invention provides the detection of molecular interactions in living organisms (e.g., bacteria, yeast, eukaryotes, mammals, primates, human, etc.) and/or cells. In some embodiments, fusion proteins comprising signal and interaction (target) polypeptides are co-expressed in the cell or whole organism, and signal is detected and correlated to the formation of the interaction complex. In some embodiments, cells are transiently and/or stably transformed or transfected with vector(s) coding for non-luminescent element(s), interaction element(s), fusion proteins (e.g., comprising a signal and interaction element), etc. In some embodiments, transgenic organisms are generated that code for the necessary fusion proteins for carrying out the assays described herein. In other embodiments, vectors are injected into whole organisms. In some embodiments, a transgenic animal or cell (e.g., expressing a fusion protein) is used to monitor the biodistribution of a small molecule or a biologic tethered (e.g., conjugated or genetically fused) to NLpeptide sequence that would form a complex in the subcellular compartments and/or tissues where it concentrates.

[0208] The compositions and methods provided herein, as well as any techniques or technologies based thereon find use in a variety of applications and fields, a non-limiting list of example applications follows:
[0209] Antibody-free Western Blot: For example, a protein of interest is fused to a non-luminescent peptide (e.g., by genetic engineering) and expressed by any suitable means. The proteins separated (e.g., by PAGE) and transferred to a membrane. The membrane is then washed with complimentary non-luminescent polypeptide (e.g. allowing a luminescent complex to form), and placed on imager (e.g., utilizing a CCD camera) with Furimazine (PBI-3939) atop the membrane, and the protein of interest is detected (e.g., via the luminescence of the luminescent complex).
[0210] “LucCytochemistry”: For example, a protein of interest is expressed fused to a non-luminescent peptide or polypeptide and then detected with a complimentary non-luminescent polypeptide or peptide in a fashion analogous to immunocytochemistry.
[0211] Protein localization assay: For example, a localization signal is added to a non-luminescent polypeptide or polypeptide (e.g., via genetic engineering) and expressed in cells (e.g., a nuclear localization signal added would result in expression of the non-luminescent polypeptide in the nucleus). A complimentary non-luminescent peptide or polypeptide is fused to a protein of interest (e.g., via genetic engineering) and expressed in cells with the non-luminescent polypeptide or peptide. Luminescence is produced if the protein of interest localizes in the same subcellular compartment (e.g., the nucleus) as the signal-localized non-luminescent polypeptide.
[0212] Protein Stability Assay: For example, a protein of interest is fused to a non-luminescent peptide or polypeptide (e.g., via genetic engineering) and incubated under one or more conditions of interest. A complimentary non-luminescent polypeptide or peptide is added (e.g., at various time points), and luminescence is used to quantify the amount of protein of interest (e.g., a proxy for stability).
[0213] Protein Detection/Quantification: For example, a protein of interest fused to a non-luminescent peptide or polypeptide (e.g., via genetic engineering) and expressed and/or manipulated by any method. The complimentary non-luminescent polypeptide or peptide is then added to detect and/or quantify the protein of interest.
[0214] Protein Purification: For example, a protein of interest is fused to a non-luminescent peptide or polypeptide (e.g., via genetic engineering) and expressed by any method. The mixture of proteins is passed through an immobilized complimentary non-luminescent polypeptide or peptide (e.g., on beads, on a column, on a chip, etc.), washed with suitable buffer and eluted (e.g., with a buffer of high ionic strength or low pH). A mutant form of the non-luminescent peptide or polypeptide that does not activate the luminescence of the complimentary non-luminescent peptide or polypeptide may be used to elute the protein of interest.
[0215] Pull-down: For example, an immobilized, complimentary, non-luminescent polypeptide is used to isolate a protein of interest (and interacting proteins) that is fused to a non-luminescent peptide (e.g., via genetic engineering).
[0216] G-Coupled Protein Receptor (GPCR) Internalization Assay: For example, a non-luminescent peptide or polypeptide is fused to a GPCR of interest (e.g., via genetic engineering) and expressed on the surface of cells. A complimentary non-luminescent polypeptide or peptide is added to the media of the cells and used to detect the GPCR on cell surface. A ligand is added to stimulate the internalization of the GPCR, and a decrease in luminescence is observed.
[0217] Membrane Integrity Assay for Cell Viability: For example, when the cell membrane of a cell expressing a non-luminescent polypeptide become compromised, a non-luminescent peptide enters the cell (e.g., a peptide that otherwise can't cross the cell membrane), thereby forming a luminescent complex, and generating luminescence.
[0218] 5-Hydroxymethyl Cytosine Detection: For example, a cysteine is added to a non-luminescent peptide and incubated with DNA and a methyltransferase. The methyltransferase catalyzes the addition of the thiol (cysteine) only onto cytosine residues that are 5-hydroxymethylated. Unincorporated peptide is then separated from the DNA (using any method possible), and a non-luminescent polypeptide is added to detect the peptide conjugated to the DNA.
[0219] Formyl Cytosine Detection: For example, similar to the 5-hydroxymethyl cytosine detection above, this detection method uses chemistry with specific reactivity for formyl cytosine.
[0220] Viral Incorporation: Nucleic acid coding for a non-luminescent peptide or polypeptide is incorporated into a viral genome, and the complementary non-luminescent polypeptide or peptide is constitutively expressed in the target cells. Upon infection of the target cells and expression of the non-luminescent peptide, the bioluminescent complex forms and a signal is detected (e.g., in the presence of substrate).
[0221] Chemical Labeling of Proteins: A non-luminescent peptide is fused or tethered to a reactive group (e.g., biotin, succinimidyl ester, maleimide, etc.). A protein of interest (e.g., antibody) is tagged with the non-luminescent peptide through binding of the reactive group to the protein of interest. Because the peptide is small, it does not affect the functionality of the protein of interest. Complimentary non-luminescent polypeptide is added to the system, and a luminescent complex is produced upon binding to the polypeptide to the peptide.

[0222] The above applications of the compositions and methods of the present invention are not limiting and may be modified in any suitable manner while still being within the scope of the present invention.

[0223] The present invention also provides methods for the design and/or optimization of non-luminescent pairs/groups and the bioluminescent complexes that form therefrom. Any suitable method for the design of non-luminescent pairs/groups that are consistent with embodiments described herein, and/or panels thereof, is within the scope of the present invention.

[0224] In certain embodiments, non-luminescent pairs/groups are designed de novo to lack luminescence individually and exhibit luminescence upon association. In such embodiments, the strength of the interaction between the non-luminescent elements is insufficient to produce a bioluminescent signal in the absence of interaction elements to facilitate formation of the bioluminescent complex.

[0225] In other embodiments, non-luminescent elements and/or non-luminescent pairs are rationally designed, for example, using a bioluminescent protein (e.g., SEQ ID NO: 2157) as a starting point. For example, such methods may comprise: (a) aligning the sequences of three or more related proteins; (b) determining a consensus sequence for the related proteins; (c) providing first and second fragments of a bioluminescent protein that is related to the ones from which the consensus sequence was determined, wherein the fragments are individually substantially non-luminescent but exhibit luminescence upon interaction of the fragments; (d) mutating the first and second fragments at one or more positions each (e.g., in vitro, in silico, etc.), wherein said mutations alter the sequences of the fragments to be more similar to a corresponding portion of the consensus sequence, wherein the mutating results in a non-luminescent pair that are not fragments of a preexisting protein, and (e) testing the non-luminescent pair for the absence of luminescence when unassociated and luminescence upon association of the non-luminescent pair. In other embodiments, first and second fragments of one of the proteins used in determining the consensus sequence are provided, mutated, and tested.

[0226] In some embodiments, the above methods are not limited to the design and/or optimization of non-luminescent pairs. The same steps are performed to produce pairs of elements that lack a given functionality (e.g., enzymatic activity) individually, but display such functionality when associated. In any of these cases, the strength of the interaction between the non-luminescent pair elements may be altered via mutations to ensure that it is insufficient to produce functionality in the absence of interaction elements that facilitate formation of the bioluminescent complex.

### EXPERIMENTAL

### Example 1

### Generation of Peptides

[0227] Peptide constructs were generated by one of three methods: annealing 5′-phosphorylated oligonucleotides followed by ligation to pF4Ag-Barnase-HALOTAG vector (Promega Corporation; cut with SgfI and XhoI) or pFN18A (Promega Corporation; cut with SgfI and XbaI), site directed mutagenesis using Quik Change Lightning Multi kit from Agilent or outsourcing the cloning to Gene Dynamics.

### Example 2

### Peptide Preparation

[0228] The peptides generated in Example 1 were prepared for analysis by inoculating a single colony of KRX E. coli cells (Promega Corporation) transformed with a plasmid encoding a peptide into 2-5 ml of LB culture and grown at 37° C. overnight. The overnight cultures (10 ml) were then diluted into 1 L of LB and grown at 37° C. for 3 hours. The cultures were then induced by adding 10 ml 20% rhamnose to the 1 L culture and induced at 25° C. for 18 hours.

[0229] After induction, 800 ml of each culture was spun at 5000×g at 4° C. for 30 minutes. The pellet generated was then resuspended in 80 ml Peptide Lysis Buffer (25 mM HEPES pH 7.4, 0.1× Passive Lysis Buffer (Promega Corporation), 1 ml/ml lysozyme and 0.03 U/μl RQ1 DNase (Promega Corporation)) and incubated at room temperature for 15 minutes. The lysed cells were then frozen on dry ice for 15 minutes and then thawed in a room temperature bath for 15 minutes. The cells were then spun at 3500×g at 4° C. for 30 minutes. The supernatants were aliquoted into 10 ml samples with one aliquot of 50 μl placed into a 1.5 ml tube.

[0230] To the 50 μl samples, 450 μl H₂O and 167 μl 4×SDS Loading Dye were added, and the samples incubated at 95° C. for 5 minutes. After heating, 5 μl of each sample was loaded (in triplicate) onto an SDS-PAGE gel, and the gel run and stained according to the manufacturer's protocol. The gel was then scanned on a Typhoon Scanner (excitation 532 nm, emission 580 nm, PMT sensitivity 400V). The resulting bands were quantified using the ImageQuant (5.2) software. Each of the three replicate intensities was averaged, and the average intensity of NLpep53-HT was defined at 12× concentration. The concentrations of all other peptides were relative to Pep53-HT.

### Example 3

### Peptide Analysis

[0231] All of the peptides generated in Examples 1-2 contained single mutations to the peptide sequence: GVTGWRLCKRISA (SEQ ID NO: 236). All of the peptides were fused to a HALOTAG protein (Promega Corporation). Peptides identified as “HT-NLpep” indicate that the peptide is located at the C-terminus of the HALOTAG protein. In this case, the gene encoding the peptide includes a stop codon, but does not include a methionine to initiate translation. Peptides identified as “NLpep-HT” indicate that the peptide is at the N-terminus of the HALOTAG protein. In this case, the peptide does include a methionine to initiate translation, but does not include a stop codon.

[0232] To determine the ability of the peptides to activate luminescence, individual colonies of KRX E. coli cells (Promega Corporation) was transformed with a plasmid encoding a peptide from Example 1, inoculated in 200 μl of minimal medium (1× M9 salts, 0.1 mM CaCl₂, 2 mM MgSO₄, 1 mM Thiamine HCl, 1% gelatin, 0.2% glycerol, and 100 ul/ml Ampicillin) and grown at 37° C. overnight. In addition to the peptides, a culture of KRX E. coli cells expressing a wild-type (WT) fragment of residues 1-156 of the NanoLuc was grown. All peptides and the WT fragment were inoculated into at least 3 separate cultures.

[0233] After the first overnight growth, 10 μl of culture was diluted into 190 μl fresh minimal medium and again grown at 37° C. overnight.

[0234] After the second overnight growth, 10 μl of the culture was diluted into 190 μl of auto-induction medium (minimal medium+5% glucose and 2% rhamnose). The cultures were then inducted at 25° C. for approximately 18 hours.

[0235] After induction, the small peptide mutant cultures were assayed for activity. The cultures containing the WT 1-156 fragment were pooled, mixed with 10 ml of 2× Lysis Buffer (50 mM HEPES pH 7.4, 0.3× Passive Lysis Buffer, and 1 mg/ml lysozyme) and incubated at room temperature for 10 minutes. 30 μl of the lysed WT 1-156 culture was then aliquoted into wells of a white, round bottom 96-well assay plate (Costar 3355). To wells of the assay plate, 20 μl of a peptide culture was added, and the plate incubated at room temperature for 10 minutes. After incubation, 50 μl NANOGLO Luciferase Assay Reagent (Promega Corporation) was added, and the samples incubated at room temperature for 10 minutes. Luminescence was measured on a GLOMAX luminometer with 0.5 s integrations.

[0236] The results (See Table 3 and FIG. 1) demonstrate various mutations in the peptide (relative to SEQ ID NO: 1) that altered (e.g., increased, decreased) the luminescence following complementation with the wild-type non-luminescent polypeptide. The increased luminescence is thought to stem from one (or a combination) of five main factors, any of which are beneficial: affinity between the non-luminescent peptide and non-luminescent polypeptide, expression of the peptide, intracellular solubility, intracellular stability, and bioluminescent activity. The present invention though is not limited to any particular mechanism of action and an understanding of the mechanism of action is not necessary to practice the present invention.

TABLE 3

| Mutation | HT-NLPep | NLpep-HT | HT-Pep st. dev. | Pep-HT st.dev. |
|---|---|---|---|---|
| G157D | 0.1137 | 0.5493 | N.D. | N.D. |
| G157N | 0.6415 | 3.3074 | 0.2512 | 1.4828 |
| G157S | 1.9937 | 1.7156 | 0.8554 | 1.0563 |
| G157E | 0.1959 | 1.4461 | 0.0811 | 0.3221 |
| G157H | 0.9380 | 0.5733 | 0.4366 | 0.2277 |
| G157C | N.D. | 0.0468 | N.D. | 0.0081 |
| G157P | N.D. | 0.0543 | N.D. | 0.0106 |
| V158I | 0.6075 | 1.6010 | 0.3283 | 0.6264 |
| V158A | 0.1348 | 0.1438 | 0.0561 | 0.0447 |
| V158K | 0.0770 | 0.1923 | 0.0323 | 0.0521 |
| V158Q | 0.0445 | 0.0397 | 0.0188 | 0.0160 |
| V158S | 0.0487 | 0.0838 | 0.0189 | 0.0251 |
| T159V | 0.5658 | 0.0455 | 0.2293 | 0.0005 |
| T159K | 0.0490 | 0.0307 | 0.0120 | 0.0103 |
| T159Q | 0.3979 | 0.0310 | 0.1063 | 0.0091 |
| W161T | 0.0028 | 0.0100 | 0.0007 | 0.0049 |
| W161K | 0.0002 | 0.0008 | 9.7E−06 | 0.0001 |
| W161V | 0.0086 | 0.0050 | 0.0062 | 0.0016 |
| W161F | N.D. | 0.0717 | N.D. | 0.0049 |
| W161Y | N.D. | 0.2154 | N.D. | 0.0103 |
| W161E | N.D. | 0.0012 | N.D. | 0.0002 |
| L163I | N.D. | 0.2923 | N.D. | 0.1198 |
| L163V | 0.1727 | 0.1190 | 0.0257 | 0.0288 |
| L163T | 0.0259 | 0.0262 | 0.0077 | 0.0122 |
| L163Y | 0.0512 | 0.1959 | 0.0126 | 0.1043 |
| L163K | 0.0885 | 0.0786 | 0.0130 | 0.0244 |
| C164N | 0.0874 | 0.1081 | 0.0097 | 0.0160 |
| C164T | 0.0116 | 0.0084 | 0.0029 | 0.0013 |
| C164F | N.D. | 13.3131 | N.D. | 3.6429 |
| C164Y | N.D. | 1.0092 | N.D. | 0.2592 |
| C164S | N.D. | 0.0202 | N.D. | 0.0029 |
| C164H | N.D. | 0.7597 | N.D. | 0.2149 |
| C164M | N.D. | 3.2618 | N.D. | 1.1763 |
| C164A | N.D. | 0.0858 | N.D. | 0.0196 |
| C164Q | N.D. | 0.0211 | N.D. | 0.0044 |
| C164L | N.D. | 1.0170 | N.D. | 0.2464 |
| C164K | N.D. | 0.0005 | N.D. | 0.0001 |
| R166K | 1.0910 | 1.2069 | 0.2266 | 0.5913 |
| R166N | 0.1033 | 0.1182 | 0.0289 | 0.0542 |
| I167V | 0.8770 | 1.0824 | 0.1113 | 0.2642 |
| I167Q | 0.0178 | 0.1172 | 0.0252 | 0.0150 |
| I167E | 0.2771 | 0.2445 | 0.0358 | 0.0456 |
| I167R | 0.0464 | 0.0469 | 0.0027 | 0.0084 |
| I167F | 0.2832 | 0.1793 | 0.0159 | 0.0683 |
| A169N | 0.9115 | 1.7775 | 0.1114 | 0.5901 |
| A169T | 0.9448 | 1.3720 | 0.0930 | 0.6021 |
| A169R | 0.9851 | 0.5014 | 0.2205 | 0.1895 |
| A169L | 1.1127 | 0.9047 | 0.1906 | 0.2481 |
| A169E | 0.8457 | 0.7889 | 0.1445 | 0.0819 |

### Example 4

### Generation of Non-Luminescent Polypeptides

[0237] Using pF4Ag-NanoLuc1-156 (WT 1-156) as a template, error-prone PCR (epPCR) was performed using the Diversify PCR Random Mutagenesis Kit from Clontech. The resulting PCR product was digested with SgfI and XbaI and ligated to pF4Ag-Barnase (Promega Corporation), a version of the commercially-available pF4A vector (Promega) which contains T7 and CMV promoters and was modified to contain an E. coli ribosome-binding site. Following transformation into KRX E. coli cells (Promega Corporation) by heat shock at 42° C., individual colonies were used to inoculate 200 μl cultures in clear, flat bottom 96-well plates (Costar 3370).

### Example 5

### Non-Luminescent Polypeptide Analysis

[0238] To determine the luminescence of the non-luminescent polypeptide mutants generated in Example 4, individual colonies of the KRX E. coli cells (Promega Corporation) transformed with a plasmid containing one of the non-luminescent polypeptide mutants from Example 4 was grown according to the procedure used in Example 3. The bacterial cultures were also induced according to the procedure used in Example 3.

[0239] To assay each non-luminescent polypeptide mutant induced culture, 30 μl of assay lysis buffer (25 mM HEPES pH 7.4, 0.3× Passive Lysis Buffer (Promega Corporation)), 0.006 U/μl RQ1 DNase (Promega Corporation) and 1× Peptide Solution (the relative concentration of the peptides were determined as explained in Example 2; from the relative concentration determined, the peptides were diluted to 1× in the lysis buffer) containing either the peptide fragment GVTGWRLCKRISA (SEQ ID NO: 18) or GVTGWRLFKRISA (SEQ ID NO: 106) were aliquoted into wells of a 96-well assay plate (Costar 3355). To the wells of the assay plate, 20 μl of an induced non-luminescent polypeptide mutant culture was added, and the plate incubated at room temperature for 10 minutes. After incubation, 50 μl of NANOGLO Luciferase Assay Reagent (Promega Corporation) was added, and the samples incubated at room temperature for 10 minutes. Luminescence was measured on a GLOMAX luminometer with 0.5 s integrations.

[0240] The results (Table 4 and FIG. 2) demonstrate numerous point mutations that improve the luminescence of the non-luminescent polypeptide upon complementation with two different peptides. Similar to the mutations in the peptide, these mutations in the non-luminescent polypeptide may stem from various factors, all of which are beneficial to the system as a whole.

TABLE 4

| Mutation | V157D | F31I | L18Q | R11N |
|---|---|---|---|---|
| GVTGWRLCKRISA | 4.98 | 4.1 | 3.81 | 3.37 |
| st dev | 0.48 | 0.37 | 0.29 | 0.67 |
| GVTGWRLFKRISA | 3.02 | 2.83 | 2.99 | 2.09 |
| st dev | 0.77 | 0.61 | 0.82 | 0.03 |
| Mutation | Q32R | M106V | M106I | G67S |
| GVTGWRLCKRISA | 1.52 | 1.3 | 1.27 | 1.22 |
| st dev | 0.2 | 0.22 | 0.04 | 0.26 |
| GVTGWRLFKRISA | 1.04 | 1.4 | 1.31 | 1.29 |
| st dev | 0.19 | 0.25 | 0.35 | 0.22 |
| Mutation | F31L | L149M | N33K | I59T |
| GVTGWRLCKRISA | 3.13 | 2.89 | 2.15 | 1.07 |
| st dev | 0.26 | 0.39 | 0.2 | 0.07 |
| GVTGWRLFKRISA | 2.86 | 2.16 | 1.76 | 1.35 |
| st dev | 0.7 | 0.26 | 0.08 | 0.37 |
| Mutation | I56N | T13I | F31V | N33R |
| GVTGWRLCKRISA | 0.44 | 2.18 | 2.12 | 2.1 |
| st dev | 0.05 | 0.75 | 0.09 | 0.18 |
| GVTGWRLFKRISA | 1.81 | 1.44 | 2.12 | 1.56 |
| st dev | 0.35 | 0.34 | 0.46 | 0.16 |
| Mutation | V27M | Q20K | V58A | K75E |
| GVTGWRLCKRISA | 1.99 | 4.43 | 1.88 | 2.08 |
| st dev | 0.09 | 0.84 | 0.6 | 0.47 |
| GVTGWRLFKRISA | 1.7 | 2.33 | 1.07 | 2.05 |
| st dev | 0.11 | 0.38 | 0.26 | 0.37 |
| Mutation | G15S | G67D | R112N | N156D |
| GVTGWRLCKRISA | 1.98 | 1.78 | 1.61 | 1.57 |
| st dev | 0.99 | 0.11 | 0.2 | 0.21 |
| GVTGWRLFKRISA | 2.34 | 1.57 | 1.45 | 1.21 |
| st dev | 0.82 | 0.17 | 0.47 | 0.26 |

| Mutation | D108N | N144T | N156S |
|---|---|---|---|
| GVTGWRLCKRISA | 2.08 | 3.69 | 1.04 |
| st dev | 0.6 | 1.12 | 0.29 |
| GVTGWRLFKRISA | 1.88 | 2.26 | 1.4 |
| st dev | 0.38 | 0.51 | 0.28 |

*Units in Table 4 are RLU(mutant)/RLU(WT)

### Example 6

### Glycine to Alanine Substitutions in Non-Luminescent Polypeptide

[0241] The following example identified glycine residues within the non-luminescent polypeptide that can be substituted to alanine to provide an improved (e.g., greater luminescent signal) non-luminescent polypeptide. The substitutions were made singly (See FIG. 3), or in composites (FIG. 2). Non-luminescent polypeptides containing glycine to alanine substitutions were generated as described in Example 1.

[0242] Each single mutant colony was inoculated in 200 μl Minimal Media (lx M9 salts, 0.1 mM CaCl₂, 2 mM MgSO₄, 1 mM Thiamine HCl, 1% gelatin, 0.2% glycerol and 1× ampicillin) and incubated with shaking at 37° C. for 20 hours. 10 μl of the culture was then added to 190 μl of fresh Minimal Media and incubated again with shaking at 37° C. for 20 hours. 10 μl of the second culture was then added to 190 μl Auto-Induction Media (Minimal Media+5% glucose+2% rhamnose) and incubated with shaking at 25° C. for 18 hours to allow expression of the non-luminescent polypeptide.

[0243] To assay each mutant culture, 30 μl of assay lysis buffer (50 mM HEPES pH 7.5, 0.3× Passive Lysis Buffer (Promega Corporation)) and 0.006 U/μl RQ1 DNase (Promega Corporation)) containing non-luminescent peptide (1:10 dilution of NLpep9-HT (NLpep9 is SEQ ID NO: 17 and 18; HT is HaloTag E. coli clarified lysate) was added. The samples were shaken at room temperature for 10 minutes, and then 50 μl NANOGLO Luciferase Assay Reagent (Promega Corporation) was added. The samples were incubated at room temperature for 10 minutes, and luminescence was measured on a GLOMAX luminometer with 0.5 s integrations.

[0244] To generate the NLpep9-HT E. coli clarified lysate, 5 ml LB was inoculated with a single E. coli colony of NLpep9-HT and incubated at 37° C. overnight. 500 μl of the overnight culture was then diluted in 50 mls LB and incubated at 37° C. for 3 hours. 500 μl of 20% rhamnose was added and incubated at 25° C. for 18 hours. The expression culture was centrifuged at 3000×g for 30 minutes, and the cell pellet resuspended in 5 ml peptide lysis buffer (25 mM HEPES, pH 7.5, 0.1× Passive Lysis Buffer, 1 mg/ml lysozyme, and 0.3 U/μl RQ1 DNase) and incubated at room temperature for 10 minutes. The lysed sample was placed on dry ice for 15 minutes, thawed in a room temperature water bath and centrifuged at 3500×g for 30 minutes. The supernatant was the clarified lysate.

[0245] FIGS. 3 and 4 demonstrate the effects of the mutations on luminescence.

### Example 7

### Mutations in Non-Luminescent Peptide

[0246] In the following example, mutations were made in the non-luminescent peptide based on alignment to other fatty acid binding proteins (FABPs) and were chosen based on high probability (frequency in FABPs) to identify a mutation that retains/improves activity (such as NLpep2, 4, and 5) or establish that a mutation is not likely to be tolerated at that position (such as NLpep3). NLpep1-5 contain single mutations (See Table 1), and NLpep6-9 are composite sets of the mutations in NLpep2, 4, and 5 (See Table 1). Mutants were generated as described in Example 1.

[0247] Each mutant colony was inoculated in 200 μl Minimal Media and incubated with shaking at 37° C. for 20 hours. 10 μl of the culture was then added to 190 μl of fresh Minimal Media and incubated again with shaking at 37° C. for 20 hours. 10 μl of the second culture was then added to 190 μl Auto-Induction Media and incubated with shaking at 25° C. for 18 hours to allow expression of the non-luminescent peptide mutant.

[0248] To assay each mutant culture, 30 μl of assay lysis buffer (50 mM HEPES pH 7.5, 0.3× Passive Lysis Buffer (Promega Corporation)) and 0.006 U/μl RQ1 DNase (Promega Corporation)) containing non-luminescent polypeptide (1:10 dilution of wild-type non-luminescent polypeptide E. coli clarified lysate) was added. The samples were shaken at room temperature for 10 minutes, and then 50 μl NANOGLO Luciferase Assay Reagent (Promega Corporation) added. The samples were incubated at room temperature for 10 minutes, and luminescence was measured on a GLOMAX luminometer with 0.5 s integrations.

[0249] FIG. 1 shows the luminescence (RLUs) detected in each non-luminescent peptide mutant. The results demonstrate various positions that are able to tolerate a mutation without substantial loss in luminescence, as well as a few specific mutations that improve luminescence.

### Example 8

### Effect of Orientation of Fusion Tag on Luminescence

[0250] In the following example, luminescence generated by non-luminescent peptides with N- or C-terminus HaloTag protein was compared.

[0251] Single colony of each peptide-HT fusion was grown according to the procedure used in Example 7. The bacterial cultures were also induced according to the procedure used in Example 7. Luminescence was assayed and detected according to the procedure used in Example 7. FIGS. 6 and 7 demonstrate the luminescence (RLUs) detected in each peptide-HT fusion. The results demonstrate combinations of mutations that produce similar luminescence as NLpep1.

### Example 9

### Effect of Multiple Freeze-Thaw Cycles on non-luminescent peptides

[0252] 1 ml of NLpep9-HT was frozen on dry ice for 5 minutes and then thawed in a room temperature water bath for 5 minutes. 60 μl was then removed for assaying. The freeze-thaw procedure was then repeated another 10 times. After each freeze-thaw cycle, 60 μl of sample was removed for assaying.

[0253] To assay, 20 μl of each freeze-thaw sample was mixed with 30 μl of SEQ ID NO:2 and incubated at room temperature for 10 minutes. 50 μl of NANOGLO Luciferase Assay Reagent was added, and the samples incubated at room temperature for 10 minutes. Luminescence was measured on a GLOMAX luminometer with 0.5 s integrations. The results are depicted in FIG. 8 and demonstrate that NLpep can be subjected to multiple freeze-thaw cycles without a loss in activity (luminescence).

### Example 10

### Distinction of Mutations in Non-Luminescent Peptides

[0254] In the following example, TMR gel analysis was used to normalize the concentration of the non-luminescent peptide mutants to distinguish mutations that alter the expression from those that alter luminescence (e.g., altered luminescence may stem from altered binding affinity).

[0255] 5 ml of LB was inoculated with a single mutant peptide colony and incubated with shaking at 37° C. for 20 hours. 50 μl of the overnight culture was diluted into 5 ml of fresh LB and incubated with shaking at 37° C. for 3 hours. 50 μl of 20% rhamnose was then added and incubated with shaking at 25° C. for 18 hours.

[0256] For TMR gel analysis, 79 μl of each induced culture was mixed with 10 μl 10× Fast Break Lysis Buffer (Promega Corporation), 10 μl of a 1:100 dilution of HALOTAG TMR ligand (Promega Corporation) non-luminescent polypeptide and 10 μl of RQ1 DNase and incubated at room temperature for 10 minutes. 33.3 μl of 4×SDS-loading buffer was added, and the samples incubated at 95° C. for 5 minutes. 15 μl of each sample was loaded onto an SDS gel and run according to the manufacturer's directions. The gel was then scanned on a Typhoon. Each culture was diluted based on the TMR-gel intensity to normalize concentrations. 20 μl of each diluted culture was then mixed with 30 μl assay lysis buffer containing non-luminescent polypeptide (1:10 dilution of SEQ ID NO: 2 E. coli clarified lysate) and incubated with shaking at room temperature for 10 minutes. 50 μl of NANOGLO Luciferase Assay Reagent was added, and the samples incubated at room temperature for 10 minutes. Luminescence was measured on a GLOMAX luminometer with 0.5 s integrations (SEE FIG. 9).

### Example 11

### Site Saturation in Non-Luminescent Polypeptide

[0257] In the following example, positions 11, 15, 18, 31, 58, 67, 106, 149, and 157 were identified as sites of interest from screening the library of random mutations in wild-type non-luminescent polypeptide. All 20 amino acids at these positions (built on 5A2 non-luminescent mutant generated in Example 6 (SEQ ID NOS: 539 and 540) to validate with other mutations in the 5A2 mutant) were compared to determine the optimal amino acid at that position. Mutant non-luminescent polypeptides were generated as previously described in Example 1. Single colony of each non-luminescent polypeptide mutant was grown according to the procedure used in Example 6. The bacterial cultures were also induced according to the procedure used in Example 6. Luminescence was assayed and detected according to the procedure used in Example 6 expect NLpep53 E. coli clarified lysate was used at 1:11.85 dilution. FIGS. 10-18 demonstrate the effect of the mutations on the ability to produce luminescence with and without NLpep.

### Example 12

### Comparison of Cysteine Vs. Proline as First Amino Acid in Non-Luminescent Peptide

[0258] In the following example, a comparison of using cysteine or proline as first amino acid (after necessary methionine) in the non-luminescent peptide was performed. The mutant non-luminescent peptides were generated as previously described in Example 1. Single colony of each non-luminescent polypeptide mutant was grown according to the procedure used in Example 7. The bacterial cultures were also induced according to the procedure used in Example 7. Luminescence was assayed and detected according to the procedure used in Example 7. FIG. 19 demonstrates that both cysteine and proline can be used as the first amino acid of NLpep and produce luminescence.

### Example 13

### Identification of the Optimal Composite Set of Mutations for the Non-Luminescent Peptide

[0259] In the following examples, an optimal composite set(s) of mutations for the non-luminescent peptide were identified. The mutant non-luminescent peptides were generated as previously described in Example 1.
[0260] 1) For non-luminescent peptide composite mutants NLpep53, NLpep66, NLpep67, and NLpep68, a single colony of each was grown according to the procedure used in Example 10. The bacterial cultures were also induced according to the procedure used in Example 10. TMR gel analysis and luminescence was assayed and detected according to the procedure used in Example 10. The results in FIG. 20 demonstrate the luminescence as well as the E. coli expression of NLpeps containing multiple mutations.
[0261] 2) For non-luminescent peptide composite mutants NLpep53 and NLpeps 66-74, a single colony of each was grown according to the procedure used in Example 7. The bacterial cultures were also induced according to the procedure used in Example 7. Luminescence was assayed and detected according to the procedure used in Example 7. The results in FIG. 21 demonstrate the luminescence of NLpeps containing multiple mutations.
[0262] 3) For non-luminescent peptide
[0263] composite mutants NLpep53 and NLpeps 66-76, a single colony of each was grown according to the procedure used in Example 7. The bacterial cultures were also induced according to the procedure used in Example 7 Luminescence was assayed and detected according to the procedure used in Example 7 except the non-luminescent polypeptide was 5A2 or 5A2+R11E (1:10 dilution of E. coli clarified lysate). The results in FIG. 22 demonstrate the luminescence of NLpeps containing multiple mutations with 5A2 or 5A2+R11E. These results also demonstrate the lower luminescence when the NLpoly mutation R11E is complemented with an NLpep containing E as the 9th residue (NLpep72, 75, and 76).
[0264] 4) For non-luminescent peptide composite mutants NLpep1, NLpep69, NLpep78 and NLpep79, a single colony of each was grown according to the procedure used in Example 7. The bacterial cultures were also induced according to the procedure used in Example 7. Luminescence was assayed and detected according to the procedure used in Example 7 except the non-luminescent polypeptide was WT (1:10 dilution of E. coli clarified lysate). The results in FIG. 23 demonstrate the luminescence of NLpeps containing multiple mutations.

### Example 14

### Composite Non-Luminescent Polypeptide Mutants

[0265] In the following example, 9 mutations from the library screens were combined into a composite clone (NLpoly1, SEQ ID NOS: 941,942), and then one of the mutations reverted back to the original amino acid (NLpoly2-10, SEQ ID NOS: 943-960) in order to identify the optimal composite set. Based on previous results of NLpoly1-10, NLpoly11-13 (SEQ ID NOS: 961-966) were designed and tested for the same purpose. Mutant NLpolys were generated as previously described in Example 1. Single colony of each non-luminescent polypeptide mutant was grown according to the procedure used in Example 6. The bacterial cultures were also induced according to the procedure used in Example 6 Luminescence was assayed and detected according to the procedure used in Example 6 expect NLpep53 E. coli clarified lysate was used at 1:11.85 dilution.

[0266] FIG. 24 demonstrates the luminescence of NLpolys containing multiple mutations.

### Example 15

### Substrate Specificity of Non-Luminescent Polypeptide Mutants

[0267] The following example investigates the substrate specificity of the non-luminescent polypeptide mutants. Luminescence generated from luminescent complexes formed from various non-luminescent polypeptide mutants, either Furimazine or coelenterazine as a substrate, and various non-luminescent peptides.

[0268] HEK 293 cells were plated at 100,000 cells/ml into wells of a 24 well plates containing 0.5 ml DMEM+10% FBS (50,000/well). The cells were incubated in a 37° C., 5% CO₂ incubator overnight. DNA for expression of each non-luminescent polypeptide mutant was transfected in duplicate. 1 ug plasmid DNA containing a non-luminescent polypeptide mutant was mixed with OptiMEM (Life Technologies) to a final volume of 52 ul. 3.3 μl of Fugene HD (Promega Corporation) was added, and samples incubated for 15 minutes at room temperature. 25 μl of each sample mixture was added to two wells and incubated overnight in a 37° C., 5% CO₂ incubator overnight. After overnight incubation, the growth media was removed and 0.5 ml DMEM (without phenol red)+0.1% Prionex added. The cells were then frozen on dry ice (for how long) and thawed prior to detecting luminescence.

[0269] In FIGS. 25-26, luminescence was assayed and detected according to the procedure used in Example 6, except NLpep53 E. coli clarified lysate was used at 1:10 dilution and either Furimazine or coelenterazine in either NanoGlo Luciferase Assay buffer or DMEM were used. This data demonstrates the luminescence of NLpolys in NANOGLO and DMEM with either Furimazine or Coelenterazine as the substrate. This indicates the substrate specificity (Furimazine versus Coelenterazine) of the NLpoly in both NANOGLO and DMEM.

[0270] In FIG. 27, luminescence was assayed and detected according to the procedure used in Example 6, except E. coli clarified lysate from various non-luminescent peptides (NLpep1, NLpep9, NLpep48, NLpep53, NLpep69 or NLpep76) were used at 1:10 dilution. In addition, either Furimazine or coelenterazine in either NanoGlo Luciferase Assay buffer were used. This data demonstrates the substrate specificity of NLpoly/NLpep pairs.

[0271] In FIG. 28, luminescence was assayed and detected by separately diluting NLpep53-HT fusion 1:10 and the non-luminescent polypeptide lysates 1:10 in DMEM+0.1% Prionex. 20 μl of non-luminescent peptide and 20 μl non-luminescent polypeptide were then combined and incubated for 10 minutes at room temperature. 40 μl of NanoGlo Buffer with 100 uM Furimazine or DMEM with 0.1% Prionex and 20 uM Furimazine was then added to the samples, and luminescence detected on GloMax Multi. This data demonstrates the substrate specificity of NLpolys expressed in HEK293 cells.

[0272] In FIG. 29, luminescence was assayed and detected by separately diluting NLpep1-HT, NLpep53-HT, NLpep69-HT or NLpep76-HT fusion 1:10 and the non-luminescent polypeptide lysates 1:10 in DMEM+0.1% Prionex. 20 μl of non-luminescent peptide and 20 μl non-luminescent polypeptide were then combined and incubated for 10 minutes at room temperature. 40 μl of NanoGlo Buffer with 100 uM Furimazine or DMEM with 0.1% Prionex and 20 uM Furimazine was then added to the samples, and luminescence detected on GloMax Multi. This data demonstrates the luminescence of NLpolys expressed in mammalian cells and assayed with various NLpeps.

### Example 16

### Signal-to-Background of Non-Luminescent Polypeptide Mutants with Furimazine or Coelenterazine

[0273] The following example investigates signal-to-background of the non-luminescent polypeptide mutants. Luminescence generated from various non-luminescent polypeptide mutants was measured using either Furimazine or coelenterazine as a substrate as well as with various non-luminescent peptides.

[0274] HEK 293 cells were plated at 15,000 cells/well in 100 μl DMEM+10% FBS into wells of 96-well plates. The cells were incubated in a 37° C., 5% CO₂ incubator overnight. Transfection complexes were prepared by adding 0.66 ug each of plasmid DNA for expression of a non-luminescent polypeptide mutant and a non-luminescent peptide mutant plasmid to a final volume of 31 μl in OptiMem. 2 μl Fugene HD was added to each transfection complex and incubated for 15 minutes at room temperature. For each peptide/polypeptide combination, 5 μl of a transfection complex was added to 6 wells of the 96-well plate and grown overnight at 37 C in CO₂ incubator. After overnight incubation, the growth media was removed and replaced with CO₂-independent media containing either 20 uM coelenterazine or 20 uM Furimazine. The samples were incubated for 10 minutes at 37° C., and kinetics measured over the course of 1 hour at 37° C. on a GloMax Multi+. FIG. 30 demonstrates the substrate specificity of various NLpoly/NLpep pairs when the NLpoly is expressed in mammalian cells.

### Example 17

### Luminescence and Substrate Specificity

[0275] The following example investigates the luminescence and substrate specificity of various non-luminescent polypeptide mutants with NLpep69 and using either Furimazine or coelenterazine as a substrate.

[0276] CHO cells were plated at 20,000 cells/well in 100 μl of DMEM+10% FBS into wells of 96-well plates. The cells were incubated in a 37° C., 5% CO2 incubator overnight. Transfection complexes were prepared by adding 0.66 ug each of plasmid DNA for expression of a non-luminescent polypeptide mutant and a non-luminescent peptide mutant plasmid to a final volume of 31 μl in OptiMem. 2 μl Fugene HD was added to each transfection complex and incubated for 15 minutes at room temperature. For each peptide/polypeptide combination, 5 μl of transfection complex was added to 6 wells of the 96-well plate and grown overnight at 37 C in CO₂ incubator. After overnight incubation, the growth media was removed and replaced with CO₂— independent media containing either 20 uM coelenterazine or 20 uM Furimazine. The samples were incubated for 10 minutes at 37° C., and kinetics measured over the course of 1 hour at 37° C. on a GloMax Multi+. FIG. 31 demonstrates the substrate specificity when NLpolys are coexpressed in mammalian cells with NLpep69.

### Example 18

### Luminescence and Substrate Specificity Between Live-Cell and Lytic Conditions

[0277] The following example investigates the luminescence and substrate specificity of various non-luminescent polypeptide mutants with NLpep69, NLpep78 or NLpep79, using either Furimazine or coelenterazine as a substrate and under either lytic or live cell conditions.

[0278] HEK 293 cells were plated at 15,000 cells/well in 100 μl DMEM+10% FBS into wells of 96-well plates. The cells were incubated in a 37° C., 5% CO2 incubator overnight. Transfection complexes were prepared by adding 0.66 ug each of plasmid DNA for expression of a non-luminescent polypeptide mutant and a non-luminescent peptide mutant plasmid to a final volume of 31 μl in OptiMem. 2 μl Fugene HD was added to each transfection complex and incubated for 15 minutes at room temperature. For each NLpoly-NLpep combination, 5 μl of transfection complex was added to 6 wells of the 96-well plate and grown overnight at 37 C in CO2 incubator. After overnight incubation, the growth media was removed and replaced with CO2- independent media containing either 20 uM coelenterazine or 20 uM Furimazine. The samples were incubated for 10 minutes at 37° C., and kinetics measured over the course of 1 hour at 37° C. on a GloMax Multi+. FIGS. 32-34 demonstrate the substrate specificity of NLPolys coexpressed in mammalian cells with NLpep69, 78, or 79 in live-cell and lytic formats.

### Example 19

### Comparison of Non-Luminescent Polypeptide Mutants Expressed in E. coli

[0279] A single colony of each non-luminescent polypeptide was grown according to the procedure used in Example 7. The bacterial cultures were also induced according to the procedure used in Example 7. Luminescence was assayed and detected according to the procedure used in Example 7 except NLpep78-HT or NLpep79-HT at 1:1,000 dilution was used. FIG. 35 demonstrates the luminescence of NLpolys expressed in E. coli and assayed with NLpep78 or 79.

### Example 20

### Ability of non-luminescent polypeptide clones to produce luminescence without complementing non-luminescent peptide

[0280] A single colony of each non-luminescent polypeptide was grown according to the procedure used in Example 7. The bacterial cultures were also induced according to the procedure used in Example 7. Luminescence was assayed and detected according to the procedure used in Example 7 except no non-luminescent peptide was added to the assay buffer. FIG. 36 demonstrates the luminescence of NLpolys expressed in E. coli and assayed in the absence of NLpep.

### Example 21

### Substrate Specificity of Non-Luminescent Polypeptide Mutants Expressed in E. coli

[0281] A single colony of each non-luminescent polypeptide was grown according to the procedure used in Example 7. The bacterial cultures were also induced according to the procedure used in Example 7. Luminescence was assayed and detected according to the procedure used in Example except either Furimazine or coelenterazine was mixed with NANOGLO Assay Buffer. FIG. 37 demonstrates the substrate specificity of NLpolys expressed in E. coli and assayed with NLpep78 or 79.

### Example 22

### Improved Luminescence of Non-Luminescent Polypeptide Mutants with NLpep78

[0282] Complementation of the non-luminescent polypeptide mutants with NLpep78-HT was demonstrated in CHO and Hela cells.

[0283] CHO and Hela cells (CHO: 100,000 seeded the day prior to transfection; Hela: 50,000 seeded the day prior to transfection) were transfected with 5 ng of a non-luminescent polypeptide mutant 5A2 or 5P or with wild-type non-luminescent polypeptide using Fugene HD into wells of a 24-well plate and incubated at 37° C. overnight. After the overnight incubation, the media was replaced with DMEM without phenol red, and the cells frozen at −80° C. for 30 minutes. The cells were then thawed and transferred to a 1.5 ml tube. The cell lysates were then diluted 1:10 DMEM without phenol red, 20 μl mixed with NLpep78 (NLpep78-HT7 E. coli lysate diluted 1:1,000 in DMEM without phenol red) and shaken at room temperature for 10 minutes. 40 μl DMEM without phenol red and 20 uM Furimazine was added and luminescence measured on a GloMax with a 0.5 second integration. FIG. 38 demonstrates the luminescence of NLpolys expressed in mammalian cells and assayed with NLpep78.

### Example 23

### Non-Luminescent Polypeptide Fusions and Normalizing Non-Luminescent Polypeptide Concentrations

[0284] A comparison of raw and normalized luminescence from non-luminescent polypeptide fused to either firefly luciferase (FIG. 39) or click beetle red luciferase (FIG. 40) were performed to provide insight into how much benefit, e.g., in expression, solubility and/or stability, stems from the concentration of the non-luminescent polypeptide as well as complementation as a fusion non-luminescent polypeptide.

[0285] HEK293, Hela or CHO cells were transfected with 5 ng 5P NLpoly-firefly luciferase fusion, 5P NLpoly-click beetle luciferase fusion, wild-type 5P-firefly luciferase fusion or wild-type 5P-click beetle luciferase fusion according to the procedure in Example 22. Lysates were also prepared according to Example 22. The cell lysates were then diluted 1:10 DMEM without phenol red, 20 μl mixed with NLpep78 (diluted 1:100 in DMEM without phenol red; E. coli lysate) and shaken at room temperature for 10 minutes. 40 μl NanoGlo with 20 uM Furimazine or Bright-Glo (Promega Corporation) was added and luminescence measured on a GloMax with 0.5 second integration. FIGS. 39 and 40 demonstrate the specific activity of 5P versus WT NLpoly expressed in mammalian cells and assayed with NLpep78.

### Example 24

### Complementation in Live Cells

[0286] This example demonstrates complementation in live-cells using either wild-type or 5P NLpoly. Hela cells plated into wells of 96-well plated, transfected with 0.5 ng of wild-type or 5P non-luminescent polypeptide plasmid DNA using Fugene HD and incubated at 37° C. overnight. After the overnight incubation, the cells were then transfected with 0.5 ng NLpep78-HT plasmid DNA using Fugene HD and incubated at 37° C. for 3 hours. The media was then replaced with CO₂-independent media+0.1% FBS and 20 uM PBI-4377, and luminescence measured at 37° C. on a GloMax with 0.5 second integration. FIG. 41 demonstrates the live-cell complementation between 5P or WT NLpoly and NLpep78.

### Example 25

### Complementation in Cell-Free Extract

[0287] To demonstrate complementation in cell-free extract, 0.5 ug NLpep78-HT and 0.5 ug non-luminescent polypeptide mutant plasmid DNA were mixed with TNT rabbit reticulocyte lysate master mix (Promega Corporation) and incubated at 30° C. for 1 hour. 25 μl of the cell-free expression extract was mixed with 25 μl NanoGlo Luciferase Assay reagent and incubated at room temperature for 10 minutes. Luminescence was measured on a GloMax with 0.5 second integration. FIG. 42 demonstrates luminescence from complementing NLpoly/NLpep pairs expressed in a cell-free format.

### Example 26

### Binding Affinity of Non-Luminescent Polypeptide Expressed in Mammalian Cells with Synthetic Non-Luminescent Peptide

[0288] To demonstrate the binding affinity between non-luminescent polypeptide and non-luminescent peptide pairs, non-luminescent polypeptide lysates from Hela, HEK293 and CHO cells were prepared as previously described and diluted 1:10 PBS+0.1% Prionex. 4× concentrations of non-luminescent peptide (synthetic) were made in PBS+0.1% Prionex. 20 μl of the non-luminescent polypeptide lysate was mixed with 20 μl non-luminescent peptide and shaken at room temperature for 10 minutes. 40 μl of NanoGlo Luciferase Assay Reagent or PBS+0.1% Prionex with Furimazine was added and shaken at room temperature for 10 minutes. Luminescence was detected on a GloMax with 0.5 s integration. Kd values were determined using Graphpad Prism, One Site-Specific Binding. FIGS. 43 and 44 demonstrate the dissociation constants measured under various buffer conditions (PBS for complementation then NanoGlo for detection, PBS for complementation and detection, NanoGlo for complementation and detection).

### Example 27

### Improved Binding Affinity when Cysteine Mutated to Phenylalanine in Non-Luminescent Peptide Mutants

[0289] To demonstrate improved binding affinity in non-luminescent peptide mutants with a mutated cysteine at the 8^{th} residue of the peptide, non-luminescent polypeptide mutant lysates from Hela, HEK293 and CHO cells were prepared as previously described and diluted 1:10 PBS+0.1% Prionex. 4× concentrations of non-luminescent peptide (NLpep) were made in PBS+0.1% Prionex+10 mM DTT. 20 μl of the non-luminescent polypeptide lysate was mixed with 20 μl non-luminescent peptide and shaken at room temperature for 10 minutes. 40 μl of NanoGlo Luciferase Assay Reagent was added and shaken at room temperature for 10 minutes. Luminescence was detected on a GloMax with 0.5 s integration. FIG. 45 demonstrates NLpep C8F mutation significantly improves the binding affinity for 5P.

### Example 28

### Detectable Luminescence of Polypeptide Variants without Non-Luminescent Peptide in Hela Cells

[0290] To demonstrate luminescence in non-luminescent polypeptide without non-luminescent peptide, Hela cells (10,000 seeded the day prior to transfection) in wells of a 96-well plate were transfected with varying amounts of non-luminescent polypeptide+pGEM-3zf Carrier DNA to a total of 50 ng using Fugene HD and incubated 37° C. overnight. After incubation, the media was replaced with CO₂-independent media+0.1% FBS+20 uM Furimazine and incubated at 37° C. for 10 minutes, and luminescence detected on a GloMax with 0.5 s integration. FIG. 46 demonstrates the luminescence of NLpoly WT or 5P in live Hela cells without NLpep after transfection of various amounts of plasmid DNA.

### Example 29

### Generation of Additional Non-Luminescent Polypeptide Variants

[0291] Additional non-luminescent polypeptide variants: Ile-11 (Ile at residue 11), Val-11, Tyr-11, Glu-11, Glu-157, Pro-157, Asp-157, Ser-157, Met-149, Leu-106, NLpoly11, and NLpoly12 were generated as described below, and their expression analyzed. The additional non-luminescent polypeptide variants were made in the 5A2 non-luminescent polypeptide background.

[0292] Fresh individual colonies (KRX) of each additional non-luminescent polypeptide variants were picked and grown overnight in LB+ampicillin (100 ug/ml) at 30° C. and then diluted 1:100 in LB+ampicillin and grown at 37° C. for 2.5 hours (OD₆₀₀ ˜0.5). Rhamnose was added to a final concentration of 0.2%, and the cells were split in triplicate and grown overnight at 25° C. for ˜18 h. Cells were lysed using 0.5× Fast Break for 30 minutes at ambient temperature, snap-frozen on dry ice, and stored at −20° C. Upon fast thawing, soluble fractions were prepared by centrifugation at 10K for 15 min at 4° C. Samples were assayed for luminescence on a Tecan Infinite F-500 luminometer.

[0293] FIG. 49 demonstrates that total lysate and soluble fraction of each non-luminescent polypeptide variant as analyzed by SDS-PAGE. The data provides information about expression, solubility and stability of the additional non-luminescent polypeptide variants. A majority of the additional non-luminescent polypeptide variants produced more protein (total and soluble) than wild-type, but in many cases, the difference is subtle. Improved expression for NLpoly11 and NLpoly12 was more noticeable.

### Example 30

### Background Luminescence of Additional Non-Luminescent Polypeptide Variants

[0294] The background luminescence of the additional non-luminescent polypeptide variants generated in Example 29 was measured by incubating 25 μl of non-luminescent polypeptide variant lysate with 25 μl DMEM at room temperature for 10 minutes. 50 μl NanoGlo Luciferase Assay Reagent was then added, and luminescence measured at 5 and 30 minutes on a Tecan Infinite F500. NLpep53 (Pep 53) alone and DMEM (DMEM) alone were used as controls. FIG. 47 demonstrates that a majority of the additional non-luminescent polypeptide variants showed elevated background luminescence.

### Example 31

### Luminescence of Additional Non-Luminescent Polypeptide Variants after Complementation

[0295] Luminescence of the additional non-luminescent polypeptide variants generated in Example 28 was measured by incubating 25 μl of non-luminescent polypeptide variant lysate with 25 μl NLpep-53 at room temperature for 10 minutes 50 μl NanoGlo Luciferase Assay Reagent was then added, and luminescence measured at 5 and 30 minutes on a Tecan Infinite F500. NLpep53 (Pep 53) alone and DMEM (DMEM) alone were used as controls. FIG. 48 demonstrates that the non-luminescent polypeptide variants Val-11, Glu-11, Glu-157, Pro-157, Asp-157, Ser-157 and Met-149 generated significantly more luminescence than parental 5A2.

### Example 32

### Correlation Between Increased Background Luminescence of Non-Luminescent Polypeptide in the Absence of Non-Luminescent Peptide and Amount of Protein in Soluble Fraction

[0296] Individual colonies of the non-luminescent polypeptide variants 3P, 3E, 5P, 5E, 6P and 6E were picked and grown overnight in LB+ampicillin at 30° C. and then diluted 1:100 in LB+ampicillin and grown at 37° C. for 2.5 hours (OD₆₀₀ ˜0.5). Rhamnose was added to a final concentration of 0.2%, and the cells were split in triplicate and grown overnight at 25° C. for ˜18 h. Cells were lysed using 0.5× Fast Break for 30 minutes at ambient temperature, snap-frozen on dry ice, and stored at −20° C. Upon fast thawing, soluble fractions were prepared by centrifugation at 10K for 15 min at 4° C. Samples were assayed for luminescence on a Tecan Infinite F-500. FIG. 50A shows the total lysate and soluble fraction of each non-luminescent polypeptide variant. FIG. 50B shows the background luminescence of each non-luminescent polypeptide variant. FIG. 51 shows the luminescence generated with each non-luminescent polypeptide variant when complemented with 10 or 100 nM NLpep78 (NVSGWRLFKKISN) in LB medium.

### Example 33

### Elongations and Deletions of Non-Luminescent Polypeptide

[0297] The non-luminescent polypeptide variant 5P was either elongated at the C-terminus by the addition of the residues VAT, AA, VTG, VT, VTGWR, VTGW, V, A, VA, GG, AT, GTA, ATG or GT or deletion of 1 to 7 residues at the C-terminus of 5P, e.g., D1=deletion of 1 residue, D2=deletion of 2 residues, etc. Background luminescence in E. coli lysates (FIG. 52) and luminescence generated after complementation with NLpep78 (FIG. 53; NVSGWRLFKKISN) or NLpep79 (FIG. 54; NVTGYRLFKKISN) were measured. FIG. 55 shows the signal-to-background of the non-luminescent polypeptide 5P variants. FIG. 56 provides a summary of the luminescent results. FIG. 57 shows the amount of total lysate and soluble fraction in each non-luminescent polypeptide 5P variant.

### Example 34

### Comparison of 5P and I107L Non-Luminescent Polypeptide Variant

[0298] FIG. 58 shows the amount of total lysate and soluble fraction of 5P and I107L (A), luminescence generated by 5P or I107L without non-luminescent peptide or with NLpep78 or NLpep79 (B) and the improved signal-to-background of I107L over 5P(C).

### Example 35

### Generation of 5P Non-Luminescent Polypeptide Mutants

[0299] Mutations identified in a screening of random mutations in the 5P non-luminescent polypeptide variant were generated as previously described. Each single 5P non-luminescent polypeptide mutant colony was inoculated in 200 μl Minimal Media and incubated with shaking at 37° C. for 20 hours. 10 μl of the culture was then added to 190 μl of fresh Minimal Media and incubated again with shaking at 37° C. for 20 hours. 10 μl of the second culture was then added to 190 μl Auto-Induction Media (Minimal Media+5% glucose+2% rhamnose) and incubated with shaking at 25° C. for 18 hours to allow expression of the non-luminescent polypeptide mutant. 10 μl of the 5P non-luminescent polypeptide mutant expression culture was added to 40 μl of assay lysis buffer containing NLpep78-HT (1:386 dilution) or NLpep79-HT (1:1,000 dilution) and shaken at room temperature for 10 minutes. 50 μl of NanoGlo Assay Buffer containing 100 uM coelenterazine was added and shaken at room temperature for 10 minutes. Luminescence was measured on GloMax with 0.5 sec integration. FIGS. 59-62A shows background luminescence while FIGS. 59-62B and C show luminescence generated after complementation with NLpep78 or NLpep79.

### Example 36

### Binding Affinity Between Elongated Non-Luminescent Polypeptide Variant and Deleted Non-Luminescent Peptide

[0300] The binding affinity between an elongated non-luminescent polypeptide variant, i.e., containing additional amino acids at the C-terminus, and a deleted non-luminescent peptide, i.e., deleted amino acids at the N-terminus.

[0301] Lysates of E. coli expressing non-luminescent polypeptide 5P/+V/+VT/+VTG prepared as previously described were diluted 1:2000 in PBS+0.1% Prionex. 25 μl of the diluted lysate was incubated with 25 μl of NLpep78, NLpep80, NLpep81 or NLpep82 (diluted 0-500 nM in dilution buffer) for 5 min at room temp. 50 μl of Furimazine diluted to 1× with NanoGlo Assay Buffer was added to each sample and incubated for 10 minutes at room temperature. Luminescence was measured on a GloMax Multi with 0.5 s integration time. FIG. 63 demonstrates the binding affinity between NLpolys with additional amino acids at the C-terminus with NLpeps with amino acids deleted from the N-terminus

### Example 37

### Binding Affinity Between Non-Luminescent Polypeptide Expressed in E. coli and Synthetic Non-Luminescent Peptide

[0302] Non-luminescent polypeptide LB lysates were prepared and diluted 1:100 into PBS+0.1% Prionex. 2× dilutions of synthetic NLpep78 were made in PBS+0.1% Prionex. 25 μl of the diluted non-luminescent polypeptide lysate was mixed with 25 μl of each dilution of non-luminescent peptide and incubated 3 minutes at ambient temperature. 50 μl of NanoGlo Luciferase Assay Reagent was added, incubated for 5 minutes at room temperature, and luminescence measured on a GloMax Multi+. FIG. 64 shows the calculated Kd values using one-site specific binding.

### Example 38

### Binding Affinity Between 5P Non-Luminescent Polypeptide Expressed in Mammalian Cells and NLpep80 or NLpep87

[0303] Lysates of CHO, HEK293T, or HeLa cells expressing NLpoly 5P were diluted 1:1000 in dilution buffer (PBS+0.1% Prionex.) 25 μl of diluted lysate was incubated with 25 μl of NLpep80/87 (diluted 0-5 μM in dilution buffer) for 5 min at room temp. 50 μl of furimazine (diluted to 1× with NanoGlo buffer) was added to each well, and the plate was incubated for 10 min at room temp. Luminescence was then read on a GloMax Multi with 0.5 s integration time (FIG. 65).

### Example 39

### Binding Affinity Between 5P Non-Luminescent Polypeptide Expressed in E. coli and NLpep80 or NLpep87

[0304] Lysates of E. coli expressing NLpoly 5P were diluted 1:2000 in dilution buffer (PBS+0.1% Prionex.) 25 μl of diluted lysate was incubated with 25 μl of NLpep80/87 (diluted 0-5 μM in dilution buffer) for 5 min at room temp. 50 μl of furimazine (diluted to 1× with NanoGlo buffer) was added to each well, and the plate was incubated for 10 min at room temp. Luminescence was then read on a GloMax Multi with 0.5 s integration time (FIG. 66).

### Example 40

### Complementation Between a Deleted Non-Luminescent Polypeptide and Elongated Non-Luminescent Peptide

[0305] Complementation between a deleted non-luminescent polypeptide, i.e., amino acids deleted from the C-terminus, and an elongated non-luminescent peptide, i.e., amino acids added to the N-terminus, was performed. NLpep-HT E. coli clarified lysates as prepared as previously described in Example 6. The amount of NLpep-HT was quantitated via the HaloTag fusion. Briefly, 10 μl of clarified lysate was mixed with 10 μl HaloTag-TMR ligand (diluted 1:100) and 80 μl water and incubated at room temperature for 10 minutes. 33.3 μl 4×SDS Loading Buffer was added and incubated at 95° C. for 5 minutes. 15 μl was loaded onto an SDS-PAGE gel and imaged on a Typhoon. Based on the intensities from the SDS-PAGE gel, non-luminescent peptides were diluted in PBS+0.1% Prionex non-luminescent peptides to make equivalent concentrations. The non-luminescent polypeptide lysates were then diluted 1:100 in PBS+0.1% Prionex. 20 μl of diluted non-luminescent polypeptide and 20 μl diluted non-luminescent peptide were mixed and shaken at room temperature for 10 minutes. 40 μl NanoGlo Luciferase Assay Reagent was added and shaken at room temperature for 10 minutes. Luminescence was measured on a GloMax using 0.5 sec integration. FIG. 67 demonstrates the luminescence of NLpolys with amino acids removed from the C-terminus with NLpeps with additional amino acids on the N-terminus

### Example 41

### Binding Affinity Between 5P Non-Luminescent Polypeptide Expressed in Hela Cells and NLpep78 or Truncated NLpep78 (NLpep80-87)

[0306] 5P non-luminescent polypeptide lysate was prepared from Hela cells as previously described and diluted prepared 1:10 in PBS+0.1% Prionex. 4× concentrations (range determined in preliminary titration experiment) of non-luminescent peptide (synthetic peptide; by Peptide 2.0 (Virginia); made at either 5, 10, or 20 mg scale; blocked at the ends by acetylation and amidation, and verified by net peptide content analysis) was prepared in PBS+0.1% Prionex. 20 μl P non-luminescent polypeptide and 20 μl non-luminescent peptide were mixed and shaken at room temperature for 10 minutes. 40 μl of NanoGlo Luciferase Assay reagent was added and shaken at room temperature for 10 minutes. Luminescence was measured on GloMax with 0.5 s integration. FIG. 68 demonstrates the binding affinity and corresponding luminescence between 5P and truncated versions of NLpep78. The binding affinity is increased when 1 amino acid is removed from the N-terminus, the C-terminus, or 1 amino acid from each terminus. Removing more than 1 amino acid from either terminus lowers the affinity but does not always lower the Vmax to the same extent.

### Example 42

### Binding Affinity Between Elongated Non-Luminescent Polypeptide and Truncated Non-Luminescent Peptide

[0307] The binding affinity between an elongated non-luminescent polypeptide, i.e., one with 2 extra amino acids on C-terminus, and a truncated non-luminescent peptide, i.e., one with 2 amino acids removed from N-terminus (NLpep81), was determined.

[0308] Non-luminescent polypeptide lysate was prepared as previously described and diluted prepared 1:100 in PBS+0.1% Prionex. 2× dilutions of NLpep81 (synthetic peptide; by Peptide 2.0 (Virginia); made at either 5, 10, or 20 mg scale; blocked at the ends by acetylation and amidation, and verified by net peptide content analysis) was prepared in PBS+0.1% Prionex. 25 μl non-luminescent polypeptide and 25 μl of each non-luminescent peptide dilution were mixed and shaken at room temperature for 3 minutes. 50 μl of NanoGlo Luciferase Assay reagent was added and shaken at room temperature for 5 minutes. Luminescence was measured on GloMax with 0.5 s integration. FIG. 69 shows the calculate Kd values using one-site specific binding.

### Example 43

### Binding Affinity Between Elongated Non-Luminescent Polypeptide and Truncated Non-Luminescent Peptide

[0309] The binding affinity between an elongated non-luminescent polypeptide, i.e., one with 3 extra amino acids on C-terminus, and a truncated non-luminescent peptide, i.e., one with 3 amino acids removed from N-terminus (NLpep82), was determined.

[0310] Non-luminescent polypeptide lysate was prepared and diluted prepared 1:100 in PBS+0.1% Prionex. 2× dilutions of NLpep82 (synthetic peptide; by Peptide 2.0 (Virginia); made at either 5, 10, or 20 mg scale; blocked at the ends by acetylation and amidation, and verified by net peptide content analysis) was prepared in PBS+0.1% Prionex. 25 μl non-luminescent polypeptide and 25 μl of each non-luminescent peptide dilution were mixed and shaken at room temperature for 3 minutes. 50 μl of NanoGlo Luciferase Assay reagent was added and shaken at room temperature for 5 minutes. Luminescence was measured on GloMax with 0.5 s integration. FIG. 70 shows the calculate Kd values derived using one-site specific binding.

### Example 44

### Binding Affinity Between Non-Luminescent Polypeptide Clones Expressed in E. coli and Synthetic NLpep78

[0311] Non-luminescent polypeptide variants were grown in M9 minimal media. Individual colonies were inoculated and grown overnight at 37° C. Samples were diluted 1:20 in M9 minimal media and grown overnight at 37° C. Samples were again diluted 1:20 in M9 induction media and grown overnight at 25° C. Samples were pooled, and 100 μl of the pooled cells were lysed with 400 μl of PLB lysis buffer and incubate at room temperature for 10 minutes. The lysates were diluted 1:100 in PBS+0.1% Prionex. 2× dilutions of synthetic NLpep78 were made in PBS+0.1% Prionex. 25 μl of non-luminescent polypeptide dilution was mixed with 25 μl of each non-luminescent peptide dilution and incubated for 3 minutes at room temperature. 50 μl of NanoGlo Luciferase Assay Reagent was added, incubated at room temperature for 5 minutes, and luminescence read on GloMax Multi+. FIG. 71 shows the calculate Kd values derived using one-site specific binding.

### Example 45

### Determination of the Effect of Mutations on Km

[0312] Using diluted pooled lysates from Example 11, 25 μl of non-luminescent polypeptide diluted lysate (1:100 in PBS+0.1% Prionex) was mixed with 25 μl of 500 nM NLpep78 for each sample and incubated at room temperature for 5 minutes. 2× dilutions of Furimazine in NanoGlo Luciferase Assay Buffer were prepared, and 50 μl of non-luminescent peptide and non-luminescent polypeptide sample mixed with 50 μl of NanoGlo/Furimazine dilutions. Luminescence was measured after 5 minute incubation at room temperature. FIG. 72 show the calculated Km derived using Michaelis-Menten.

### Example 46

### Demonstration of a Three-Component Complementation

[0313] A tertiary complementation using 2 NLpeps and NLpoly 5P non-luminescent polypeptide is demonstrated. NLpoly 5P-B9 (5P with residues 147-157 deleted) and NLpep B9-HT (Met+ residues 147-157 fused to N-terminus of HT7) lysates were prepared.

a) NLpoly 5P-B9+NLpoly B9 Titration with NLpep78

[0314] NLpoly 5P-B9+NLpoly B9 was titrated with NLpep78. 20 μl 5P-B9 (undiluted) was mixed with 20 μl peptideB9-HT (undiluted). Dilutions of NLpep78 (synthetic peptide, highest concentration=100 uM) were made in PBS+0.1% Prionex. 20 μl NLpep78 was added to 40 μl of the 5P-B9+peptideB9-HT mixture and shaken at room temperature for 10 minutes. 60 μl NanoGlo Luciferase Assay Reagent was added and shaken at room temperature for 10 minutes. Luminescence was measured on GloMax with 0.5 s integration.

B) NLpoly 5P-B9+NLpep78 Titration with NLpepB9-HT

[0315] 20 μl NLpoly 5P-B9 (undiluted) was mixed with 20 μl NLpep78 (100 uM). Dilutions of peptideB9-HT (highest concentration=undiluted) were made in PBS+0.1% Prionex. 20 μl of peptideB9-HT was added to 40 μl of the 5P-B9+NLpep78 mixture and shaken at room temperature for 10 minutes. 60 μl NanoGlo Luciferase Assay Reagent was added and shaken at room temperature for 10 minutes. Luminescence was measured on GloMax with 0.5 s integration.

[0316] FIG. 73 demonstrates the feasibility of a ternary system consisting of 2 different NLpeps and a truncated NLpoly. Since all 3 components are non-luminescent without the other 2, this system could be configured such that each NLpep is fused (synthetically or genetic engineering) to a binding moiety and the truncated NLpoly used at high concentrations to produce light only in the presence of an interaction between the binding moieties, or such that each of the 3 components are fused to binding moieties to produce light only in the event of ternary complex formation.

### Example 47

### Complementation with NLpep88 (NLpep78 with Gly as 6th Residue Instead of Arg)

[0317] NLpep88-HT and 5P E. coli clarified lysates were prepared as previously described. Serial dilutions of NLpep88-HT lysate were made in PBS+0.1% Prionex. 20 μl of 5P lysate and 20 μl NLpep88-HT lysate were mixed and shaken at room temperature for 10 minutes. 40 μl of NanoGlo Luciferase Assay Reagent was added and shaken at room temperature for 10 minutes. Luminescence was measured on GloMax with 0.5 s integration. FIG. 74 demonstrates the importance of the arginine residue at the 6th position of the NLpep. While there is no increase in luminescence above 5P alone at lower concentrations of NLpep88, high concentrations of NLpep increased the luminescence suggesting a catalytically compromised complex and not a lack of interaction between 5P and NLpep88.

### Example 48

### Subcellular Localization of NLpep78 and 79 as N-Terminal Fusions to HaloTag

[0318] U2OS cells were plated and left to recover overnight at 37° C. Cells were then transfected with HaloTag alone DNA construct or the HaloTag-NanoLuc peptide DNA constructs (all under the control of CMV promoter): P1-HT, P78-HT or P79-HT diluted 1:10 with carrier DNA (pSI) using FuGENE HD and incubated for 24 hours at 37° C. Cells were then labeled with HaloTag-TMR ligand by the manufacturer's standard rapid labeling protocol and imaged. FIG. 75 demonstrates that NLpep78 and 79 do not alter the intracellular localization of the HaloTag protein.

### Example 49

### Subcellular Localization of Non-Luminescent Polypeptide (WT and 5P)

[0319] U2OS cells were plated and left to recover overnight at 37° C. Cells were either kept as non-transfection controls or transfected with the NanoLuc DNA constructs: FL, NLpoly (wt) or NLpoly(5P) diluted 1:10 with carrier DNA (pSI) using FuGENE HD and incubated for 24 hours at room temperature. Cells were fixed and subsequently processed for ICC. ICC was done using 1:5000 GS (PRO) primary antibody overnight at 4° C. followed by an Alexa488 goat anti-rabbit secondary antibody. FIG. 76 demonstrates that both NLpoly WT and NLpoly 5P localize uniformly in cells.

### Example 50

### Demonstration that Non-Luminescent Polypeptide can Easily and Quickly Detect Non-Luminescent Peptide Conjugated to a Protein of Interest

[0320] 99 μl of NLpep53-HT E. coli clarified lysate was mixed with 24.75 μl 4×SDS loading buffer. 1:10 serial dilutions of the lysate-loading buffer mixture were made and incubated at 95° C. for 5 minutes. 15 μl was loaded onto a SDS-PAGE gel. After gel completions, it was transferred to PVDF using iBlot and washed with 10 mL NLpoly L149M E. coli clarified lysate at room temperature for 30 minutes. The membrane was then placed on a LAS4000 imager and 2 mL NanoGlo® Luciferase Assay Reagent added. A 60 second exposure was taken (FIG. 77).

### Example 51

### Site Saturation at Non-Luminescent Polypeptide Positions 31, 46, 108, 144, and 157 in the Context of 5P

[0321] Single amino acid change variants were constructed onto NLpoly 5P (pF4Ag vector background) at the sites according to table 5 below. In effect, the native residue was varied to each of the 19 alternative amino acids for a total of 95 variants.

TABLE 5

| Position 31 | | Position 46 | | Position 108 | | Position 144 | | Position 157 | |
|---|---|---|---|---|---|---|---|---|---|
| B1 | Ala | E3 | Ala | H5 | Ala | C8 | Ala | F10 | Ala |
| C1 | Cys | F3 | Cys | A6 | Cys | D8 | Cys | G10 | Cys |
| D1 | Asp | G3 | Asp | B6 | Asp | E8 | Asp | H10 | Asp |
| E1 | Glu | H3 | Glu | C6 | Glu | F8 | Glu | A11 | Glu |
| F1 | Gly | A4 | Phe | D6 | Phe | G8 | Phe | B11 | Phe |
| G1 | His | B4 | Gly | E6 | Gly | H8 | Gly | C11 | Gly |
| H1 | Ile | C4 | His | F6 | His | A9 | His | D11 | His |
| A2 | Lys | D4 | Ile | C6 | Ile | B9 | Ile | E11 | Ile |
| B2 | Leu | E4 | Lys | H6 | Lys | C9 | Lys | F11 | Lys |
| C2 | Met | F4 | Met | A7 | Leu | D9 | Leu | G11 | Leu |
| D2 | Asn | G4 | Asn | B7 | Met | E9 | Met | H11 | Met |
| E2 | Pro | H4 | Pro | C7 | Pro | F9 | Asn | A12 | Asn |
| F2 | Gln | A5 | Gln | D7 | Gln | G9 | Pro | B12 | Gln |
| G2 | Arg | B5 | Arg | E7 | Arg | H9 | Gln | C12 | Arg |
| H2 | Ser | C5 | Ser | F7 | Ser | A10 | Arg | D12 | Ser |
| A3 | Thr | D5 | Thr | G7 | Thr | B10 | Ser | E12 | Thr |
| B3 | Val | E5 | Val | H7 | Val | C10 | Val | F12 | Val |
| C3 | Trp | F5 | Trp | A8 | Trp | D10 | Trp | G12 | Trp |
| D3 | Tyr | G5 | Tyr | B8 | Tyr | E10 | Tyr | H12 | Tyr |

[0322] Individual colonies were grown in LB+amp and incubated overnight at 30° C. A 5P control was also included. The overnight cultures were used to inoculate fresh LB+amp (1:100), and these cultures grew for 2 hours 45 minutes at 37° C. Rhamnose was added to 0.2%, and the cultures left to grow/induce overnight at 25° C. After 18 hours of induction, cells were lysed using 0.5× FastBreak (30 min ambient temperature), snap frozen on dry ice, and stored at −20° C. Following a fast thaw, samples were assayed in the absence and presence of Pep87 (aka NLpep 87).

[0323] For the (−) peptide reactions, 30 uL lysate was incubated with 30 uL PBS pH 7.5 for 10 min and then 60 uL NanoGlo® Luciferase Assay reagent (Promega Corporation) added. After 5 minutes, luminescence was measured. For the (+) peptide reactions, 30 uL lysate was incubated with 30 uL of 8 nM Pep87. After 10 min, 60 uL NanoGlo® Luciferase Assay reagent was added, and luminescence measured at 5 minutes.

[0324] Luminescence (RLU) data for the (−) peptide samples were normalized to the readings for the 5P control, and these results are presented in FIG. 78. Luminescence (RLU) data for the (+) peptide samples were also normalized to 5P, but then also normalized to the values in FIG. 76 in order to represent signal to background (S/B; FIG. 79).

### Example 52

### Use of the High Affinity Between NLpoly and NLpep for Protein Purification/Pull Downs

[0325] MAGNEHALOTAG beads (Promega Corporation; G728A) were equilibrated as follows: a) 1 mL of beads were placed on magnet for ˜30 sec, and the buffer removed; b) the beads were removed from magnet, resuspended in 1 mL PBS+0.1% Prionex, and shaken for 5 min at RT; and c) steps a) and b) were repeated two more times NLpep78-HaloTag (E. coli clarified lysate) was bound to MAGNEHALOTAG beads by resuspending the beads in 1 mL NLpep78-HT clarified lysate, shaking for 1 hr at RT and placing on magnet for ˜30 sec. The lysate (flow through) was removed and saved for analysis. NLpoly 8S (E. coli clarified lysate) was bound to the NLpep78 bound-MagneHaloTag beads from the step above by resuspending the beads in 1.5 mL 8S lysate, shaking for 1 hr at RT and placing on a magnet for ˜30 sec. The lysate (flow through) was removed and saved for analysis. The beads were resuspended in 1 mL PBS+0.1% Prionex, shaken for 5 min at RT, placed on magnet for ˜30 sec, and PBS (wash) removed. The beads were washed three more times.

[0326] To elute the bound peptide/polypeptide, the beads were resuspended in 500 uL 1×SDS buffer and shaken for 5 min at RT. The beads were then placed on a magnet for ˜30 sec; the SDS buffer (elution) removed and saved for analysis. The elution was repeated one more time.

[0327] The samples were then analyzed by gel. 37.5 uL of sample (except elutions) was mixed with 12.5 uL 4×SDS buffer and incubated at 95° C. for 5 min. 5 uL was loaded onto a Novex 4-20% Tris-Glycine gel and run at ˜180V for ˜50 min. The gel was stained with SimplyBlue Safe Stain and imaged on a LAS4000 imager.

[0328] FIG. 94 illustrates that the affinity of NLpoly and NLpep is sufficient to allow for purification from an E. coli lysate. As NLpoly 8S was purified from an E. coli lysate, it is reasonable to expect a protein fused to NLpoly 8S (or other variant described herein) could also be purified in a similar fashion. While in this example the NLpep was immobilized and used to purify NLpoly, it is also reasonable to expect a similar result if NLpoly were immobilized.

### Example 53

### Kinetics of NLpoly/NLpep Binding

[0329] 2× concentrations of synthetic NLpep were made and diluted 2.7-fold nine times (10 concentrations) in PBS+0.1% Prionex. Final concentrations used in the assay were 30 uM-3.9 nM. WT NLpoly (E. coli clarified lysate; 1:10,000) or 11S (1:10,000,000) was diluted in NanoGlo+100 uM Furmazine (Fz). 50 uL of NLpep was placed into wells of white 96-well assay plate. 50 uL NLpoly/NanoGlo/Fz was injected into the wells using the injector on GloMax® Multi+ instrument, and luminescence measured every 3 sec over 5 min. k_{obs} was found by fitting data to: Y=Yₘₐₓ(1−e^{-k}^{_{obs}}^{t}) using Graphpad Prism. kₒₙ and k_{off} were then fitted to: k_{obs}=[NLpep]kₒₙ+k_{off}. FIG. 95 illustrates the association and dissociation rate constants for the binding between NLpolys and NLpeps.

### Example 54

### NLpoly/NLpep Substrate Affinity

[0330] NLpoly was diluted into PBS+0.1% Prionex as follows: WT at 1:10⁵, 5P at 1:10⁷, and 11S at 1:10⁸. NLpep was diluted into PBS+0.1% Prionex as follows: 30 uM for WT NLpoly studies or 3 uM for NLpoly 5P and 11S studies. 50 uL NLpoly/NLpep was incubated at RT for 5 min, 50 uL NanoGlo+Fz (ranging from 100 uM to 1.2 uM, 2×) added, and incubated for 10 min at RT. Luminescence was measured on GloMax® Multi+ with 0.5 sec integration. Km was derived using Graphpad Prism, Michaelis-Menton best-fit values. FIG. 96 illustrates the Km values for various NLpoly/NLpep pairs.

### Example 55

### Substrate Effect on NLpoly/NLpep Affinity

[0331] 11S (E. coli clarified lysate) was diluted into PBS+0.1% Prionex at 1:10⁷. Synthetic NLpep79 was diluted serially (1:2) from 800 nM to 0.39 nM (2×). 20 uL 11S+20 uL NLpep79 were then mixed and incubated for 5 min at RT. 40 uL NanoGlo+5 uM or 50 uM Fz was added and incubated another 5 min at RT. Luminescence was measured on GloMax® Multi+ with 0.5 sec integration. Kd was derived using Graphpad prism, One site-Specific binding value. FIG. 97 illustrates that saturating concentrations of furimazine increase the affinity between 11S and NLpep79.

### Example 56

### Km for NLpoly 5A2:NLpep

[0332] NLpoly 5A2 was diluted into PBS+0.1% Prionex at 1:10⁵. NLpep (WT, NLpep 78 or NLpep79) was diluted into PBS+0.1% Prionex to 30 uM. 50 uL NLpoly/NLpep was incubated at RT for 5 min. 50 uL NanoGlo+Fz (ranging from 100 uM to 1.2 uM, 2×) was added and incubated for 10 min at RT. Luminescence was measured on GloMax® Multi+ with 0.5 sec integration. Km was derived using Graphpad Prism, Michaelis-Menton best-fit values. FIG. 98 illustrates the Km values for NLpoly5A2 and NLpep WT, 78, and 79.

### Example 57

### Luminescence of NLpoly without NLpep

[0333] E. coli clarified lysate were prepared as described previously for NLpoly WT, 5A2, 5P, 8S and 11S. 50 uL of each lysate and 50 uL NanoGlo+Fz were mixed and incubated for 5 min RT. Luminescence was measured on GloMax® Multi+ with 0.5 sec integration. FIG. 99 illustrates that the ability of the NLpoly to produce luminescence in the absence of NLpep gradually increased throughout the evolution process resulting in ˜500 fold higher luminescence for 11S than WT NLpoly.

### Example 58

### Improved Luminescence in E. coli Throughout Evolution Process

[0334] A single NLpoly colony of WT, 5A2, 5P, 8S or 11S was inoculated in 200 uL minimal media and grown for 20 hrs at 37° C. on shaker. 10 uL of the overnight culture was diluted into 190 uL fresh minimal media and grown for 20 hrs at 37° C. on shaker. 10 uL of this overnight culture was diluted into 190 uL auto-induction media (previously described) and grown for 18 hrs at 25° C. on shaker. The auto-induced cultures were diluted 50-fold (4 uL into 196 uL assay lysis buffer), 10 uL expression culture added to 40 uL of assay lysis buffer containing NLpep (synthetic; 1 nM; WT, NLpep78, NL79 or NLpep80) and shaken for 10 min at RT. 50 uL NanoGlo+Fz was added, and samples shaken for 5 min at RT. Luminescence was measured on a GloMax luminometer with 0.5 sec integration. FIG. 100 illustrates the improvement in luminescence from E. coli-derived NLpoly over the course of the evolution process, an overall ˜10⁵ improvement (from NLpolyWT:NLpepWT to NLpoly11S:NLpep80).

### Example 59

### Improved Luminescence in HeLa Cells Throughout Evolution Process

[0335] 50 ng plasmid DNA expressing NLpoly WT, 5A2, 5P, 8S or 11S was transfected into HeLa cells into wells of a 12-well plate using FugeneHD. The cells were then incubated overnight at 37° C./5% CO₂. The media was replaced with 500 uL DMEM without phenol red, and the cells frozen at −80° C. for >30 min. The cells were thawed and transferred to 1.5 mL tubes. NLpep WT, NLpep78, NLpep79 or NLpep 80 (synthetic) were diluted to 10 nM in PBS+0.1% Prionex, and 25 ul mixed with 25 uL of each of the NLpoly cell lysate. The samples were shaken for 10 min at RT, and then 50 uL NanoGlo+100 uM Fz added and incubated for 5 min at RT. Luminescence was measured on a GloMax luminometer with 0.5 s integration. FIG. 101 illustrates the improvement in luminescence from HeLa-expressed NLpoly over the course of the evolution process, an overall ˜10⁵ improvement (from NLpolyWT:NLpepWT to NLpoly11S:NLpep80).

### Example 60

### Improved Luminescence in HEK293 Cells Throughout Evolution Process

[0336] 50 ng plasmid DNA expressing NLpoly WT, 5A2, 5P, 8S or 11S was transfected into HEK293 cells into wells of a 12-well plate using FugeneHD. The cells were then incubated overnight at 37° C./5% CO₂. The media was replaced with 500 uL DMEM without phenol red, and the cells frozen at −80° C. for >30 min. The cells were thawed and transferred to 1.5 mL tubes. NLpep WT, NLpep78, NLpep79 or NLpep 80 (synthetic) were diluted to 10 nM in PBS+0.1% Prionex, and 25 ul mixed with 25 uL of each of the NLpoly cell lysate. The samples were shaken for 10 min at RT, and then 50 uL NanoGlo+100 uM Fz added and incubated for 5 min at RT. Luminescence was measured on a GloMax luminometer with 0.5 s integration. FIG. 102 illustrates the improvement in luminescence from HEK293-expressed NLpoly over the course of the evolution process, an overall ˜10⁴ improvement (from NLpolyWT:NLpepWT to NLpoly11S:NLpep80).

### Example 61

### Improved Binding Affinity Throughout Evolution

[0337] NLpoly WT, 5A2, 5P, 8S or 11S (E. coli clarified lysates) were diluted into PBS+0.1% Prionex as follows: WT 1:10⁴; 5A2 1:105; 5P 1:10⁶; 8S 1:10⁷; and 11S 1:10⁷. NLpepWT, NLpep78, NLpep79 or NLpep80 (synthetic) were serially into PBS+0.1% Prionex to 4× concentration. 25 uL NLpoly and 25 uL NLpep were mixed and incubated for 10 min at RT. 50 uL NanoGlo+100 uM Fz was added and incubated for 5 min at RT. Luminescence was measured on a GloMax Multi+ with 0.5 sec integration. Kd was determined using Graphpad Prism, One Site-Specific Binding, Best-fit values. FIG. 103 illustrates a 10⁴ fold improved affinity (starting affinity: NLpolyWT:NLpepWT, Kd-10 uM) of K_{d}<1 nM (NLpoly11S:NLpep86 or NLpoly11S:NLpep80) of the variants tested over wild-type.

### Example 62

### NLpoly Luminescence

[0338] Single NLpoly variant colonies were inoculated with 200 uL minimal media and grown for 20 hrs at 37° C. on a shaker. 10 uL of the overnight culture were diluted into 190 uL fresh minimal media and grown for 20 hrs at 37° C. on a shaker. 10 uL of this overnight culture was then diluted into 190 uL auto-induction media (previously described) and grown for 18 hrs at 25° C. on a shaker. 10 uL of this expression culture was mixed with 40 uL of assay lysis buffer (previously described) without NLpep or NLpep78-HT (1:3,860 dilution) or NLpep79-HT (1:10,000 dilution) and shaken for 10 min at RT. 50 uL of NanoGlo+Fz was added and again shake for 10 min at RT. Luminescence was measured on GloMax® luminometer with 0.5 sec integration. FIGS. 105-107 illustrate the luminescence of various NLpolys in the absence of NLpep.

### Example 63

### Solubility of NLpoly Variants

[0339] A single NLpoly variant colony (SEE FIG. 143) was inoculated into 5 mL LB culture and incubated at 37° C. overnight with shaking. The overnight culture was diluted 1:100 into fresh LB and incubated at 37° C. for 3 hrs with shaking. Rhamnose was added to the cultures to 0.2% and incubated 25° C. overnight with shaking. 900 ul of these overnight cultures were mixed with 100 uL 10× FastBreak Lysis Buffer (Promega Corporation) and incubated for 15 min at RT. A 75 uL aliquot (total) was removed from each culture and saved for analysis. The remaining culture from each sample were centrifuged at 14,000×rpm in a benchtop microcentrifuge at 4° C. for 15 min. A 75 uL aliquot of supernatant (soluble) was removed from each sample and saved for analysis. 25 uL of 4×SDS buffer was added to the saved aliquots and incubated at 95° C. for 5 min. 5 ul of each sample was loaded onto a 4-20% Tris-Glycine SDS gel and run at ˜190V for ˜50 min. The gel was stained with SimplyBlue Safe Stain and imaged on a LAS4000. FIG. 143 shows a protein gel of total lysates and the soluble fraction of the same lysate for the NLpoly variants.

### Example 64

### Dissociation Constants

[0340] NLpoly variant lysate (SEE FIG. 144; prepared as described previously) was diluted 1:10 into PBS+0.1% Prionex. 4× concentrations of NLpep78 (synthetic NLpep78) were made in PBS+0.1% Prionex. 20 uL NLpoly variant lysate and 20 uL NLpep were mixed and shaken for 10 min at RT. 40 uL NanoGlo/Fz was added and shaken for 10 min at RT. Luminescence was measured on a GloMax® luminometer with 0.5 s integration. Kd determined using Graphpad Prism, One site-specific binding, best-fit values. FIG. 144 illustrates dissociation constants of NLpep78 with various NLpolys.

### Example 65

### Comparison of Luminescence Generated by Cells Expressing Different Combinations of FRB and FKBP Fused to NLpoly5P and NLpep80/87

[0341] HEK293T cells (400,000) were reverse-transfected with 1 μg pF4A Ag FKBP or 1 μg pF4A Ag FRB vectors expressing N- or C-terminal fusions of NLpoly5P and/or NLpep80/87 using FuGENE HD at a DNA-to-FuGENE HD ratio of 1:4. 24-hours post transfection, cells were trypsinized and re-plated in opaque 96-well assay plates at a density of 10,000 cells per well. 24-hours after plating, cells were washed with PBS and then incubated with or without 20 nM rapamycin for 15, 60 or 120 min in phenol red-free OptiMEMI. 10 μM furimazine substrate with or without 20 nM rapamycin in OptiMEM was added directly to each well and incubated at room temperature for 5 min. Luminescence was then measured on a GloMax Multi with 0.5 s integration time. FIGS. 108 (15 min induction), 109 (60 min induction) and 110 (120 min induction) illustrate a general increase in induction over time, with NLpoly5P and NLpep80 combinations generating the most luminescence. Individual components contribute minimally to signal.

### Example 66

### Comparison of Luminescence Generated by Cells Expressing Different Combinations of FRB and FKBP Fused to NLpoly5P and NLpep80/87

[0342] Although similar to Example 65, this example tested all 8 possible combinations of FRB and FKBP fused to NLpoly/NLpep as well as used less total DNA. HEK293T cells (400,000) were reverse-transfected with a total of 0.001 μg pF4A Ag FRB-NLpoly5P and 0.001 μg pF4A Ag FKBP-NLpep80/NLpep87 using FuGENE HD at a DNA-to-FuGENE ratio of 1 to 8. pGEM-3Zf(+) DNA was added to bring total DNA in each transfection to 1 μg. 24-hours post-transfection, 10,000 cells were re-plated in opaque 96-well assay plates and incubated an additional 24 hours. Cells were washed with PBS and then incubated in phenol red-free OptiMEMI with 0 or 50 nM rapamycin for 2 h. 10 μM furimazine substrate (final concentration on cells) with 0 or 50 nM rapamycin in OptiMEM was added directly to each well and incubated at room temperature for 5 min. Luminescence was then measured on a GloMax Multi with 0.5 s integration time. FIG. 111 illustrates that NLpep80 combinations generated the highest luminescence and that all configurations respond to rapamycin treatment.

### Example 67

### Comparison of Luminescence Generated by FRB or FKBP Fusions Expressed in the Absence of Binding Partner

[0343] HEK293T cells (400,000) were reverse-transfected with a total of 0.001 μg pF4A Ag FRB-NLpoly5P or pF4A Ag FKBP-NLpep80/NLpep87 using FuGENE HD at a DNA-to-FuGENE ratio of 1 to 8. pGEM-3Zf(+) DNA was added to bring total DNA in each transfection to 1 μg. 24-hours post-transfection, 10,000 cells were re-plated in opaque 96-well assay plates and incubated an additional 24 hours. Cells were washed with PBS and then incubated in phenol red-free OptiMEMI with 0 or 50 nM rapamycin for 2 h. 10 μM furimazine substrate (final concentration on cells) with 0 or 50 nM rapamycin in OptiMEM was added directly to each well and incubated at room temperature for 5 min. Luminescence was then measured on a GloMax Multi with 0.5 s integration time. FIG. 112 illustrates that the individual components generate a low basal level of luminescence that is not responsive to rapamycin treatment.

### Example 68

### Comparison of Luminescence Generated by Cells Transfected with Varying Amounts of FRB-NLpoly5P and FKBP-NLpep80/87 DNA

[0344] HEK293T (400,000) cells were reverse-transfected with a total of 2, 0.2, 0.02, or 0.002 μg pF4A Ag FRB-NLpoly5P and pF4A Ag FKBP-NLpep80 using FuGENE HD at a DNA-to-FuGENE ratio of 1 to 4. pGEM-3Zf(+) DNA was added to bring total DNA in each transfection to 2 μg. 24-hours post-transfection, 10,000 cells were re-plated in opaque 96-well assay plates and incubated an additional 24 hours. Cells were washed with PBS and then incubated in phenol red-free OptiMEMI with or without 20 nM rapamycin for 2 h. 10 μM furimazine substrate (final concentration on cells) with or without 20 nM rapamycin in OptiMEM was added directly to each well and incubated at room temperature for 5 min. Luminescence was then measured on a GloMax Multi with 0.5 s integration time. FIG. 113 illustrates that transfection with less DNA decreases overall luminescence but increases fold induction.

### Example 69

[0345] Comparison of Luminescence Generated by Cells Transfected with Varying Amounts of FRB-NLpoly5P or FKBP-NLpep80/87 DNA in the Absence of Binding Partner

[0346] HEK293T cells (400,000) were reverse-transfected with a total of 2, 0.2, 0.02, or 0.002 μg pF4A Ag FRB-NLpoly5P or pF4A Ag FKBP-NLpep80 using FuGENE HD at a DNA-to-FuGENE ratio of 1 to 4. pGEM-3Zf(+) DNA was added to bring total DNA in each transfection to 2 μg. 24-hours post-transfection, 10,000 cells were replated in opaque 96-well assay plates and incubated an additional 24 hours. Cells were washed with PBS and then incubated in phenol red-free OptiMEMI with or without 20 nM rapamycin for 2 h. 10 μM furimazine substrate (final concentration on cells) with or without 20 nM rapamycin in OptiMEM was added directly to each well and incubated at room temperature for 5 min. Luminescence was then measured on a GloMax Multi with 0.5 s integration time. FIG. 114 illustrates that lower DNA levels do not change overall luminescence of cells transfected with individual components.

### Example 70

### Comparison of Luminescence Generated by Cells Transfected with Varying Amounts of FRB-NLpoly5P and FKBP-NLpep80/87 DNA

[0347] HEK293T cells (400,000) were reverse-transfected with a total of 0.2, 0.02, 0.002, or 0.0002 μg pF4A Ag FRB-NLpoly5P and pF4A Ag FKBP-NLpep80/NLpep87 using FuGENE HD at a DNA-to-FuGENE ratio of 1 to 4. pGEM-3Zf(+) DNA was added to bring total DNA in each transfection to 2 μg. 24-hours post-transfection, 10,000 cells were re-plated in opaque 96-well assay plates and incubated an additional 24 hours. Cells were washed with PBS and then incubated in phenol red-free OptiMEMI with or without 50 nM rapamycin for 2 h. 10 μM furimazine substrate (final concentration on cells) with or without 50 nM rapamycin in OptiMEM was added directly to each well and incubated at room temperature for 5 min. Luminescence was then measured on a GloMax Multi with 0.5 s integration time. FIG. 115 illustrates that luminescence above background, as determined in Examples 69 and 71, and rapamycin induction can be achieved with DNA levels down to 2.5 pg.

### Example 71

### Comparison of Luminescence Generated by Cells Transfected with Varying Amounts of FRB-NLpoly5P or FKBP-NLpep80/87 DNA in the Absence of Binding Partner

[0348] HEK293T cells (400,000) were reverse-transfected with a total of 0.2, 0.02, 0.002, or 0.0002 μg pF4A Ag FRB-NLpoly5P or pF4A Ag FKBP-NLpep80/NLpep87 using FuGENE HD at a DNA-to-FuGENE ratio of 1 to 4. pGEM-3Zf(+) DNA was added to bring total DNA in each transfection to 2 μg. 24-hours post-transfection, 10,000 cells were re-plated in opaque 96-well assay plates and incubated an additional 24 hours. Cells were washed with PBS and then incubated in phenol red-free OptiMEMI with or without 50 nM rapamycin for 2 h. 10 μM furimazine substrate (final concentration on cells) with or without 50 nM rapamycin in OptiMEM was added directly to each well and incubated at room temperature for 5 min. Luminescence was then measured on a GloMax Multi with 0.5 s integration time. FIG. 116 illustrates no significant change in luminescence generated by individual components when less DNA was used.

### Example 72

### Comparison of Luminescence Generated by Cells Transfected with Varying Amounts of FRB-NLpoly5P and FKBP-NLpep80 or FKBP-NLpep87 DNA after Treatment with Rapamycin for Different Lengths of Time

[0349] HEK293T cells (400,000) were reverse-transfected with a total of 2, 0.2, 0.02, or 0.002 μg pF4A Ag FRB-NLpoly5P and pF4A Ag FKBP-NLpep80 or FKBP-NLpep87 using FuGENE HD at a DNA-to-FuGENE ratio of 1 to 4. pGEM-3Zf(+) DNA was added to bring total DNA in each transfection to 2 μg. 24-hours post-transfection, 10,000 cells were re-plated in opaque 96-well assay plates and incubated an additional 24 hours. Cells were washed with PBS and then incubated in phenol red-free OptiMEMI with or without 20 nM rapamycin for 5/15/30/60/120 min. 10 μM furimazine substrate (final concentration on cells) with or without 20 nM rapamycin in OptiMEM was added directly to each well and incubated at room temperature for 5 min. Luminescence was then measured on a GloMax Multi with 0.5 s integration time. FIGS. 117 and 118 illustrates a decline in luminescence with less DNA and an increase in rapamycin induction over time.

### Example 73

### Comparison of Luminescence Generated by Cells Expressing Different Combinations of FRB-NLpoly5P or FRB-NLpoly5A2 with FKBP-NLpep80/87/95/96/97

[0350] In this example, the assay was performed in both a two-day and three-day format. For the 2 day assay, 20,000 HEK293T cells were reverse-transfected in opaque 96-well assay plates with a total of 0.1 ng pF4A Ag FRB-NLpoly5P or FRB-NLpoly5A2 and pF4A Ag FKBP-NLpep80/87/95/96/97 using FuGENE HD at a DNA-to-FuGENE ratio of 1 to 8. pGEM-3Zf(+) DNA was added to bring total DNA in each transfection to 1 μg. 24 hours-post transfection, cells were washed with PBS and then incubated in phenol red-free OptiMEMI with or without 50 nM rapamycin for 2 h. 10 μM furimazine substrate (final concentration on cells) with or without 50 nM rapamycin in OptiMEMI was added directly to each well and incubated at room temperature for 5 min. Luminescence was then measured on a GloMax Multi with 0.5 s integration time.

[0351] For 3 day assay, 400,000 HEK293T cells were reverse-transfected with a total of 0.002 μg pF4A Ag FRB-NLpoly5P and pF4A Ag FKBP-NLpep80/87/95/96/97 using FuGENE HD at a DNA-to-FuGENE ratio of 1 to 8. pGEM-3Zf(+) DNA was added to bring total DNA in each transfection to 1 μg. 24-hours post-transfection, 10,000 cells were re-plated in opaque 96-well assay plates and incubated an additional 24 hours. Cells were washed with PBS and then incubated in phenol red-free OptiMEMI with or without 50 nM rapamycin for 2 h. 10 μM furimazine substrate (final concentration on cells) with or without 50 nM rapamycin in OptiMEMI was added directly to each well and incubated at room temperature for 5 min. Luminescence was then measured on a GloMax Multi with 0.5 s integration time. FIGS. 119 and 120 illustrate similar levels of luminescence in both the 2 day and 3 day assays. Assays performed with NLpoly5A2 showed greater rapamycin induction relative to NLpoly5P, and assays performed with NLpoly5A2 and NLpep96 showed greatest rapamycin induction of all tested combinations.

### Example 73

### Comparison of Luminescence Generated by Cells Expressing Different Combinations of FRB-NLpoly5A2 or FRB-NLpoly11S with FKBP-NLpep101/104/105/106/107/108/109/110

[0352] HEK293T cells (20,000) were reverse-transfected in opaque 96-well assay plates with a total of 0.1 ng pF4A Ag FRB-NLpoly5A2/11S and pF4A Ag FKBP-NLpep101/104/105/106/107/108/109/110 using FuGENE HD at a DNA-to-FuGENE ratio of 1 to 8. pGEM-3Zf(+) DNA was added to bring total DNA in each transfection to 1 μg. 24 hours-post transfection, cells were washed with PBS and then incubated in phenol red-free OptiMEMI with or without 50 nM rapamycin for 2 h. 10 μM furimazine substrate (final concentration on cells) with or without 50 nM rapamycin in OptiMEMI was added directly to each well and incubated at room temperature for 5 min. Luminescence was then measured on a GloMax Multi with 0.5 s integration time. FIG. 121 illustrates that, of tested combinations, NLpoly11S with NLpep101 showed the greatest rapamycin induction and one of the strongest rapamycin-specific luminescent signals.

### Example 74

### Comparison of Luminescence Generated by Cells Transfected with Different Combinations of FRB-NLpoly5A2 or FRB-NLpoly11S with FKBP-NLpep87/96/98/99/100/101/102/103

[0353] HEK293T cells (20,000) were reverse-transfected in opaque 96-well assay plates with a total of 0.1 ng pF4A Ag FRB-NLpoly5A2/11S and pF4A Ag FKBP-NLpep87/96/98/99/100/101/102/103 using FuGENE HD at a DNA-to-FuGENE ratio of 1 to 8. pGEM-3Zf(+) DNA was added to bring total DNA in each transfection to 1 μg. 24 hours-post transfection, cells were washed with PBS and then incubated in phenol red-free OptiMEMI with or without 50 nM rapamycin for 2 h. 10 μM furimazine substrate (final concentration on cells) with or without 50 nM rapamycin in OptiMEMI was added directly to each well and incubated at room temperature for 5 min. Luminescence was then measured on a GloMax Multi with 0.5 s integration time. FIG. 122 illustrates that the NLpoly11S and NLpep101 combination produces the highest induction while maintaining high levels of specific luminescence.

### Example 75

### Comparison of Luminescence Generated by Cells Transfected with Different Levels of FRB-NLpoly11S and FKBP-NLpep87/101/102/107 DNA

[0354] HEK293T cells (20,000) were reverse-transfected in opaque 96-well assay plates with a total of 0.01, 0.1, 1, or 10 ng pF4A Ag FRB-NLpoly11S and pF4A Ag FKBP-NLpep87/101/102/107 using FuGENE HD at a DNA-to-FuGENE ratio of 1 to 8. pGEM-3Zf(+) DNA was added to bring total DNA in each transfection to 1 μg. 24 hours-post transfection, cells were washed with PBS and then incubated in phenol red-free OptiMEMI with or without 50 nM rapamycin for 1.5 h. 10 μM furimazine substrate (final concentration on cells) with or without 50 nM rapamycin in OptiMEMI was added directly to each well and incubated at room temperature for 5 min. Luminescence was then measured on a GloMax Multi with 0.5 s integration time. FIG. 123 illustrates NLpoly11S with NLpep101 produces the overall lowest luminescence in untreated samples at all tested DNA levels, and the combination maintains relatively high levels of luminescence in rapamycin-treated samples.

### Example 76

### Comparison of Luminescence Generated by Cells Transfected with Different Levels of FRB-NLpoly5A2 and FKBP-NLpep87/101/102/107 DNA

[0355] HEK293T cells (20,000) were reverse-transfected in opaque 96-well assay plates with a total of 0.01, 0.1, 1, or 10 ng pF4A Ag FRB-NLpoly5A2 and pF4A Ag FKBP-NLpep87/101/102/107 using FuGENE HD at a DNA-to-FuGENE ratio of 1 to 8. pGEM-3Zf(+) DNA was added to bring total DNA in each transfection to 1 μg. 24 hours-post transfection, cells were washed with PBS and then incubated in phenol red-free OptiMEMI with or without 50 nM rapamycin for 1.5 h. 10 μM furimazine substrate (final concentration on cells) with or without 50 nM rapamycin in OptiMEMI was added directly to each well and incubated at room temperature for 5 min. Luminescence was then measured on a GloMax Multi with 0.5 s integration time. FIG. 124 illustrates that NLpoly5A2 generates higher luminescence in untreated samples than NLpoly11S shown in example 75.

### Example 77

### Rapamycin Dose Response Curve Showing Luminescence of Cells Expressing FRB-NLpoly5P and FKBP-NLpep80/87 DNA

[0356] HEK293T cells (400,000) were reverse-transfected with a total of 0.001 μg pF4A Ag FRB-NLpoly5P and 0.001 μg pF4A Ag FKBP-NLpep80/NLpep87 using FuGENE HD at a DNA-to-FuGENE ratio of 1 to 8. pGEM-3Zf(+) DNA was added to bring total DNA in each transfection to 1 μg. 24-hours post-transfection, 10,000 cells were re-plated in opaque 96-well assay plates and incubated an additional 24 hours. Cells were washed with PBS and then incubated in phenol red-free OptiMEMI with 0 to 500 nM rapamycin for 2 h. 10 μM furimazine substrate (final concentration on cells) with 0 to 500 nM rapamycin in OptiMEM was added directly to each well and incubated at room temperature for 5 min. Luminescence was then measured on a GloMax Multi with 0.5 s integration time. Kd was calculated with GraphPad Prism version 5.00 for Windows. FIG. 125 illustrates a rapamycin-specific increase in luminescence.

### Example 78

### Rapamycin Dose Response Curve Showing Luminescence of Cells Expressing FRB-NLpoly5A2 and FKBP-NLpep87/101 DNA

[0357] HEK293T cells (20,000) were reverse-transfected in opaque 96-well assay plates with a total of 0.1 ng pF4A Ag FRB-NLpoly5A2/11S and pF4A Ag FKBP-NLpep87/101 using FuGENE HD at a DNA-to-FuGENE ratio of 1 to 8. pGEM-3Zf(+) DNA was added to bring total DNA in each transfection to 1 μg. 24 hours-post transfection, cells were washed with PBS and then incubated in phenol red-free OptiMEMI with 0 to 1 μM rapamycin for 1.5 h. 10 μM furimazine substrate (final concentration on cells) with 0 to 1 μM rapamycin in OptiMEMI was added directly to each well and incubated at room temperature for 5 min. Luminescence was then measured on a GloMax Multi with 0.5 s integration time. FIG. 126 illustrates a sigmoidal dose response to rapamycin with NLpoly5A2/NLpep101 and NLpoly11S/NLpep101 combinations. While combinations with NLpep87 show an increase in luminescence with rapamycin, the collected data points deviate more from the sigmoidal curve.

### Example 79

### Comparison of Luminescence Generated by Cells Expressing FRB-11S and FKBP-101 and Treated with Substrate PBI-4377 or Furimazine

[0358] HEK293T cells (20,000) were reverse-transfected in opaque 96-well assay plates with a total of 0.1/1/10 ng pF4A Ag FRB-NLpoly11S and pF4A Ag FKBP-NLpep101 using FuGENE HD at a DNA-to-FuGENE ratio of 1 to 8. pGEM-3Zf(+) DNA was added to bring total DNA in each transfection to 1 μg. 24 hours-post transfection, cells were washed with PBS and then incubated in phenol red-free OptiMEMI with 0 or 50 nM rapamycin for 1.5 h. 10 μM furimazine or PBI-4377 substrate (final concentration on cells) with 0 to 50 nM rapamycin in OptiMEMI was added directly to each well and incubated at room temperature for 5 min. Luminescence was then measured on a GloMax Multi with 0.5 s integration time. FIG. 127 illustrates a decrease in luminescence and fold induction with the PBI-4377 substrate compared to the furimazine substrate.

### Example 80

### Time Course of Cells Expressing FRB-NLpoly11S/5A2 and FKBP-NLpep87/101 Conducted in the Presence or Absence of Rapamycin

[0359] HEK293T cells (20,000) were reverse-transfected in opaque 96-well assay plates with a total of 0.1 ng pF4A Ag FRB-NLpoly11S/5A2 and pF4A Ag FKBP-NLpep87/101 using FuGENE HD at a DNA-to-FuGENE ratio of 1 to 8. pGEM-3Zf(+) DNA was added to bring total DNA in each transfection to 1 μg. 24 hours-post transfection, cells were washed with PBS and then phenol red-free OptiMEMI with 0 or 50 nM rapamycin and 10 μM furimazine was added either manually or via instrument injection Luminescence was immediately measured on a GloMax Multi with 0.5 s integration time. FIGS. 128 and 129 illustrate that, of all combinations tested, NLpoly11S with NLpep101 has the lowest luminescence at time 0, hits a luminescent plateau faster and has the largest dynamic range.

### Example 81

### Luminescence Generated by FRB-NLpoly11S and FKBP-NLpep101 as Measured on Two Different Instruments

[0360] HEK293T cells (20,000) were reverse-transfected in opaque 96-well assay plates with a total of 0.1 ng pF4A Ag FRB-NLpoly11S and pF4A Ag FKBP-NLpep101 using FuGENE HD at a DNA-to-FuGENE ratio of 1 to 8. pGEM-3Zf(+) DNA was added to bring total DNA in each transfection to 1 μg. 24 hours-post transfection, cells were washed with PBS and then phenol red-free OptiMEMI with 0 or 50 nM rapamycin was added for 20 min. 10 μM furimazine (final concentration on cells) in OptiMEMI with 0 or 50 nM rapamycin was added and incubated for an additional 5 min. Luminescence was immediately measured on a GloMax Multi with 0.5 s integration time and on the Varioskan Flash with 450 nM band pass filter. FIG. 130 illustrates that the rapamycin-specific induction of FRB-NLpoly11S and FKBP-NLpep101 can be measured on different instruments.

### Example 82

### Images Showing Luminescence of Cells Expressing FRB-NLpoly11S and FKBP-NLpep101 at Various Times after Treatment with Rapamycin

[0361] HeLa cells (500,000) were reverse transfected with 1 μg pF4 Ag FRB-NLpoly11S and 1 μg pF4 Ag FKBP-NLpep101 using FuGENE HD at a DNA to FuGENE ratio of 1 to 4. Cells were transfected in 35 mm glass bottom culture dishes (MatTek #p35gc-1.5-14-C). 24 hours post-transfection, cells were washed with PBS and then incubate with 10 μM furimazine in OptiMEM for 5 min. 50 nM rapamycin in OptiMEMI was added to cells and luminescent images were acquired with LV200 at 10 s intervals for a total of 20 min. Instrument was at 37° C., objective was 60×, gain was 200 and exposure was 600 ms. FIG. 131 illustrates that imaging can detect an increase in cellular luminescence in cells expressing FRB-NLpoly11S and FKBP-NLpep101 following rapamycin treatment.

### Example 83

### Quantitation of the Signal Generated by Individual Cells Expressing FRB-NLpoly11S and FKBP-NLpep101 at Various Times after Treatment with Rapamycin

[0362] HeLa cells (500,000) were reverse transfected with 1 μg pF4 Ag FRB-NLpoly11S and 1 μg pF4 Ag FKBP-NLpep101 using FuGENE HD at a DNA to FuGENE ratio of 1 to 4. Cells were transfected in 35 mm glass bottom culture dishes (MatTek #p35gc-1.5-14-C). 24 hours post-transfection, cells were washed with PBS and then incubate with 10 μM furimazine in OptiMEM for 5 min. 50 nM rapamycin in OptiMEMI was added to cells, and luminescent images were acquired with LV200 at 10 s intervals for a total of 20 min. Instrument was at 37° C., objective was 60×, gain was 200, and exposure was 600 ms. The signal intensity of every cell in the field of view was analyzed with Image J software over the entire time period. FIG. 132 illustrates that signal generated by individual cells can be measured and that the increase in signal by each cell parallels the increase observed in the 96-well plate assay shown in FIGS. 128 and 129.

### Example 84

### Comparison of Luminescence in Different Cell Lines Expressing FRB-NLpoly11S and FKBP-NLpep101

[0363] HEK293T, HeLa, or U2-OS cells (20,000) were reverse-transfected in opaque 96-well assay plates with a total of 0.1 ng pF4A Ag FRB-NLpoly11S and pF4A Ag FKBP-NLpep101 using FuGENE HD at a DNA-to-FuGENE ratio of 1 to 8. pGEM-3Zf(+) DNA was added to bring total DNA in each transfection to 1 μg. 24 hours-post transfection, cells were washed with PBS and then phenol red-free OptiMEMI with 0 or 50 nM rapamycin was added for 20 min. 10 μM furimazine (final concentration on cells) in OptiMEMI with 0 or 50 nM rapamycin was added and incubated for an additional 5 min Luminescence was immediately measured on a GloMax Multi with 0.5 s integration time. FIG. 133 illustrates similar levels of luminescence generated in the absence and presence of rapamycin in three different cells lines transfected with FRB-NLpoly11S and FKBP-NLpep101.

### Example 85

### Comparison of Luminescence Generated by Cells Expressing FRB-NLpoly11S and FKBP-NLpep101 after Treatment with the Rapamycin Competitive Inhibitor FK506

[0364] HEK293T cells (20,000) were reverse-transfected in opaque 96-well assay plates with a total of 0.1 ng pF4A Ag FRB-NLpoly11S and pF4A Ag FKBP-NLpep101 using FuGENE HD at a DNA-to-FuGENE ratio of 1 to 8. pGEM-3Zf(+) DNA was added to bring total DNA in each transfection to 1 μg. 24 hours-post transfection, cells were washed with PBS and then phenol red-free OptiMEMI with 0 or 20 nM rapamycin was added for 20 min. FK506 inhibitor in OptiMEM was added to cell at final concentration of 5 μM and incubated for 3 or 5 hours. Furimazine in OptiMEM was added to cells for a final concentration of 10 μM on cells Luminescence was immediately measured on a GloMax Multi with 0.5 s integration time. FIG. 134 illustrates a decrease in rapamycin-induced luminescence after treatment with the competitive inhibitor FK506.

### Example 86

### Luminescence Generated by Cells Expressing FRB-NLpoly11S and FKBP-NLpep101 after Treatment with the Rapamycin Competitive Inhibitor FK506

[0365] HEK293T cells (20,000) were reverse-transfected in opaque 96-well assay plates with a total of 0.1 ng pF4A Ag FRB-NLpoly11S and pF4A Ag FKBP-NLpep101 using FuGENE HD at a DNA-to-FuGENE ratio of 1 to 8. pGEM-3Zf(+) DNA was added to bring total DNA in each transfection to 1 μg. 24 hours-post transfection, cells were washed with PBS and then phenol red-free OptiMEMI with 0 or 20 nM rapamycin was added for 2.5 hours. FK506 inhibitor in OptiMEM was added to cell via injector at final concentration of 0, 1 or 10 μM in OptiMEM with 10 μM Luminescence was measured every 10 min for 4 hours on a GloMax Multi set to 37° C. with 0.5 s integration time. FIG. 135 illustrates that by 200 s, FK506 inhibitor can reduce luminescence close to levels of untreated cells.

### Example 87

### Luminescence Generated by Cells Transfected with Different Combinations of V2R-NLpoly5A2 or V2R-NLpoly11S with NLpep87/101-ARRB2 in the Presence or Absence of the V2R Agonist AVP

[0366] HEK293T cells (20,000) were reverse-transfected in opaque 96-well assay plates with a total of 0.1, 1, or 10 ng pF4A Ag V2R-NLpoly11S and pF4A Ag ARRB2-NLpep87/101 using FuGENE HD at a DNA-to-FuGENE ratio of 1 to 8. pGEM-3Zf(+) DNA was added to bring total DNA in each transfection to 1 μg. 24 hours-post transfection, cells were washed with PBS and then phenol red-free OptiMEMI with 0 or 1 μM AVP and 10 μM furimazine was added for 25 min. Luminescence was then measured on a GloMax Multi with 0.5 s integration time. FIG. 136 illustrates that V2R-NLpoly11S with NLpep101 generates the greatest AVP-specific increase in luminescence. Combinations with NLpep87 show no significant response to AVP.

### Example 88

### Time Course Showing Luminescence Generated by Cells Transfected with V2R-NLpoly5A2 or V2R-NLpoly11S and NLpep87/101-ARRB2 after Treatment with AVP

[0367] HEK293T cells (20,000) were reverse-transfected in opaque 96-well assay plates with a total of 0.1 or 1 ng pF4A Ag V2R-NLpoly11S or 1 ng pF4A Ag V2R-NLpoly5A2 and pF4A Ag ARRB2-NLpep87/101 using FuGENE HD at a DNA-to-FuGENE ratio of 1 to 8. pGEM-3Zf(+) DNA was added to bring total DNA in each transfection to 1 μg. 24 hours-post transfection, cells were washed with PBS and then phenol red-free OptiMEMI with 0 or 1 μM AVP and 10 μM furimazine was added either manually (FIG. 137) or via instrument injection (FIG. 138). Luminescence was then measured on a GloMax Multi every 5 min for 25 min with 0.5 s integration time at room temperature (FIGS. 137 and 138) or 37° C. (FIG. 139). FIGS. 137 and 138 illustrate a time-dependent increase in AVP-induced luminescence for V2R-NLpoly11S with NLpep101-ARRB2 that begins to peak at 600 s. Combinations with V2R-NLpoly5A2 and NLpep87 do not show a significant increase in luminescence over time. FIG. 139 illustrates that at 37° C. all NLpoly11S and NLpep101 combinations tested show a time-dependent increase in AVP-induced luminescence that levels out around 200 s.

### Example 89

### Comparison of Luminescence in Different Cell Lines Expressing V2R-NLpoly11S and NLpep101-ARRB2

[0368] HEK293T, HeLa, or U2-OS cells (20,000) were reverse-transfected in opaque 96-well assay plates with a total of 1 ng pF4A Ag V2R-NLpoly11S and pF4A Ag ARRB2-NLpep87/101 using FuGENE HD at a DNA-to-FuGENE ratio of 1 to 8. pGEM-3Zf(+) DNA was added to bring total DNA in each transfection to 1 μg. 24 hours-post transfection, cells were washed with PBS and then phenol red-free OptiMEMI with 0 or 1 μM AVP was added for 20 min. Furimazine in OptiMEM was then added to a final concentration of 10 μM on cells, and luminescence was measured on a GloMax Multi with 0.5 s integration time.

[0369] FIG. 140 illustrates similar luminescence levels in three different cell lines expressing V2R-NLpoly11S and NLpep101-ARRB2 in the presence and absence of AVP.

### Example 90

### Luminescence of Cells Expressing V2R-NLpoly11S and NLpep101-ARRB2 at Various Times after Treatment with AVP

[0370] HeLa cells (500,000) were reverse transfected with 1 μg pF4 Ag V2R-NLpoly11S and 1 μg pF4 Ag ARRB2-NLpep101 using FuGENE HD at a DNA to FuGENE ratio of 1 to 4. Cells were transfected in 35 mm glass bottom culture dishes (MatTek #p35gc-15-14-C). 24 hours post-transfection, cells were washed with PBS and then incubate with 10 μM furimazine in OptiMEM for 5 min. 1 μM AVP in OptiMEMI was added to cells, and luminescent images were acquired with LV200 at 15 s intervals for a total of 30 min. Instrument was at 37° C., objective was 60× or 150×, gain was 600, and exposure was is or 2 s. FIGS. 141 and 142 illustrate that imaging can detect the increase in luminescence and formation of punctuate in individual cells after treatment with AVP.

### Example 91

### Dissociation Constants for NLpeps

[0371] NLpoly 5P E. coli clarified lysate (prepared as described previously) was diluted 1:1,000 into PBS+0.1% Prionex. 4× concentrations of NLpep78-HT (E. coli clarified lysate prepared as described previously) were made in PBS+0.1% Prionex. 20 uL NLpoly 5P and 20 uL NLpep78 were mixed and shaken for 10 min at RT. 40 uL NanoGlo/Fz was added and shaken for 10 min at RT. Luminescence was measured on GloMax luminometer with 0.5 s integration. Kd was determined using Graphpad Prism, One site-specific binding, best-fit values. FIG. 80 compares the dissociation constants for an NLpep consisting of either 1 or 2 repeat units of NLpep78.

### Example 92

### Affinity Between NLpoly 5A2 and NLpep86

[0372] NLpoly 5A2 lysate (prepared as described previously after transfecting CHO cells) was diluted 1:10 into PBS+0.1% Prionex. 4× concentrations of NLpep86 (synthetic NLpep) were made in PBS+0.1% Prionex. 20 uL NLpoly and 20 uL NLpep were mixed and shaken for 10 min at RT. 40 uL NanoGlo/Fz was added and shaken for 10 min at RT. Luminescence was measured on GloMax luminometer with 0.5 s integration. Kd was determined using Graphpad Prism, One site-specific binding, best-fit values. FIG. 81 illustrates the affinity between NLpoly 5A2 and NLpep86.

### Example 93

### Luminescence of NLpoly Variants

[0373] A single colony of various NLpolys were inoculated individually into 200 uL minimal media and grown for 20 hrs at 37° C. on shaker. 10 uL of overnight culture was diluted into 190 uL fresh minimal media and grown for 20 hrs at 37° C. on shaker. 10 uL of this overnight culture was diluted into 190 uL auto-induction media (previously described) and grow for 18 hrs at 25° C. on shaker. 10 uL of the expression culture was mixed with 40 uL of assay lysis buffer (previously described) without NLpep or with NLpep78-HT (1:3,860 dilution) or NLpep79-HT (1:10,000 dilution). The mixtures were shaken for 10 min at RT, 50 uL NanoGlo+Fz added and shaken again for 10 min at RT. Luminescence was measured on a GloMax luminometer with 0.5 sec integration. FIG. 82 demonstrates the luminescence from NLpoly variants without an NLpepa NLpep or with NLpep78 or NLpep79. The results show that the NLpoly variant 11S (12S-51) has improved luminescence over the other variants.

### Example 94

### Dissociation Constants and Vmax Values for NLpolys with 96 Variants of NLpeps

[0374] NLpeps were synthesized in array format by New England Peptide (peptides blocked at N-terminus by acetylation and at C-terminus by amidation; peptides in arrays were synthesized at ˜1 mg scale). Each peptide was lyophilized in 3 separate plates. Each well from 1 of the 3 plates of peptides was dissolved in 100 uL nanopure water, and the A260 measured and used to calculate the concentration using the extinction coefficient of each peptide. The concentration was then adjusted based on the purity of the peptide, and nanopure water was added to give a final concentration of 750 uM.

[0375] Peptides were diluted to 12.66 uM (4×) in PBS+0.1% Prionex and then diluted serially 7 times (8 concentrations total) in 0.5 log steps (3.162 fold dilution). NLpolys 5P, 8S, 5A2 or 11S were diluted into PBS+0.1% Prionex as follows: 5P 1:2,000; 8S 1:10,000; 11S 1:150,000, 5A2 1:1,000. 25 uL each NLpep+25 uL each NLpoly were mixed and incubated for 30 min at RT. 50 uL NanoGlo+100 uM Fz was added and incubated for 30 min at RT. Luminescence was measure on a GloMax Multi+ with 0.5 sec integration. Kd/Vmax were determined using Graphpad Prism, One site-specific binding, best-fit values. FIGS. 83-90 illustrate the dissociation constant and Vmax values from NLpolys with the 96 variant NLpeps. The results indicate specific mutations in the NLpeps that exhibit lower binding affinity without loss in Vmax.

### Example 95

### Solubility of NLpoly Variants

[0376] A single NLpoly 5A2, 12S, 11S, 12S-75, 12S-107 or 5P-B9 colony was inoculated into 5 mL LB culture and incubated at 37° C. overnight with shaking. The overnight culture was diluted 1:100 into fresh LB and incubated at 37° C. for 3 hrs with shaking. Rhamnose was added to the cultures to 0.2% and incubated 25° C. overnight with shaking. 900 ul of these overnight cultures were mixed with 100 uL 10× FastBreak Lysis Buffer (Promega Corporation) and incubated for 15 min at RT. A 75 uL aliquot (total) was removed from each culture and saved for analysis. The remaining culture from each sample was centrifuged at 14,000×rpm in a benchtop microcentrifuge at 4° C. for 15 min. A 75 uL aliquot of supernatant (soluble) was removed from each sample and saved for analysis. 25 uL of 4×SDS buffer was added to the saved aliquots and incubated at 95° C. for 5 min. 5 ul of each sample was loaded onto a 4-20% Tris-Glycine SDS gel and run at ˜190V for ˜50 min. The gel was stained with SimplyBlue Safe Stain and imaged on a LAS4000. FIG. 91 shows a protein gel of total lysates and the soluble fraction of the same lysate for the NLpoly variants. With the exception of 5A2, all variants exhibit a percentage of NLpoly in the soluble fraction.

### Example 96

### Solubility and Dissociation Constant of NLpoly Variants

[0377] A single NLpoly colony (listed in FIG. 92) was inoculated into 5 mL LB culture and incubated at 37° C. overnight with shaking. The overnight culture was diluted 1:100 into fresh LB and incubated at 37° C. for 3 hrs with shaking. Rhamnose was added to the cultures to 0.2% and incubated 25° C. overnight with shaking. 900 ul of these overnight cultures were mixed with 100 uL 10× FastBreak Lysis Buffer (Promega Corporation) and incubated for 15 min at RT. A 75 uL aliquot (total) was removed from each culture and saved for analysis. The remaining culture from each sample was centrifuged at 14,000×rpm in a benchtop microcentrifuge at 4° C. for 15 min. A 75 uL aliquot of supernatant (soluble) was removed from each sample and saved for analysis. 25 uL of 4×SDS buffer was added to the saved aliquots and incubated at 95° C. for 5 min. 5 ul of each sample was loaded onto a 4-20% Tris-Glycine SDS gel and run at ˜190V for ˜50 min. The gel was stained with SimplyBlue Safe Stain and imaged on a LAS4000. FIG. 92 shows a protein gel of total lysates and the soluble fraction of the same lysate for NLpoly variants as well a table containing the dissociation constants for the same variants.

### Example 97

### Substrate Specificity for NLpoly 5P and 11S with NLpep79

[0378] E. coli clarified lysates were prepared for NLpoly 5P or 11S as described previously. The NLpoly lysates were then serially diluted in steps of 10-fold into PBS+0.1% Prionex. 25 uL NLpoly and 25 uL synthetic NLpep79 (400 nM, 4×) were mixed and incubated for 10 min at RT. 50 uL NanoGlo+100 uM Fz was added, incubated for 10 min at RT, luminescence measured on a GloMax Multi+ with 0.5 sec integration. FIG. 93 shows the substrate specificity for 5P and 11S with NLpep79 and demonstrates that 11S has superior specificity for furimazine than 5P.

### Example 98

### Solubility of NLpoly variants from Various Steps of Evolution

[0379] A single NLpoly WT, 5A2, 5P, 8S or 11S colony was inoculated into 5 mL LB culture and incubated at 37° C. overnight with shaking. The overnight culture was diluted 1:100 into fresh LB and incubated at 37° C. for 3 hrs with shaking. Rhamnose was added to the cultures to 0.2% and incubated 25° C. overnight with shaking. 900 ul of these overnight cultures were mixed with 100 uL 10× FastBreak Lysis Buffer (Promega Corporation) and incubated for 15 min at RT. A 75 uL aliquot (total) was removed from each culture and saved for analysis. The remaining culture from each sample was centrifuged at 14,000×rpm in a benchtop microcentrifuge at 4° C. for 15 min. A 75 uL aliquot of supernatant (soluble) was removed from each sample and saved for analysis. 25 uL of 4×SDS buffer was added to the saved aliquots and incubated at 95° C. for 5 min. 5 ul of each sample was loaded onto a 4-20% Tris-Glycine SDS gel and run at ˜190V for ˜50 min. The gel was stained with SimplyBlue Safe Stain and imaged on a LAS4000. FIG. 104 shows a protein gel of total lysates and the soluble fraction of the same lysate for NLpoly variants from various steps of the evolution process. These results demonstrate that the solubility of NLpoly was dramatically increased in the evolution process.

### Example 99

### Chemical Labeling of Proteins

[0380] The non-luminescent peptides (NLpeps) of the present invention can be used to chemically label proteins. A NLpep of the present invention can be synthesized to contain a reactive group, e.g., biotin, succinimidyl ester, maleimide, etc., and attached (e.g., conjugated, linked, labeled, etc.) to a protein, e.g., antibody. The NLpep-labeled protein, e.g., NLpep-antibody, can then be used in a variety of applications, e.g., ELISA. The interaction/binding of the NLpep-labeled protein, e.g., NLpep-antibody, to its target/binding partner would be detected by adding a NLpoly of the present invention and NanoGlo® assay reagent. The luminescence generated by the interaction of the NLpep-labeled protein and NLpoly would correlate to the interaction of the NL-labeled protein to its target/binding partner. This concept could allow for multiple NLpeps to be attached to a single protein molecule thereby resulting in multiple NLpep-labeled protein/NLpoly interactions leading to signal amplification.

### Example 100

### Detection of Post-Translational Protein Modification Using HaloTag-NLpep by Western Blotting

[0381] Several proteins can be posttranslationally modified by AMPylation or ADP-ribosylation. In AMPylation, AMP is added to the target protein by a phosphodiester bond using ATP as the donor molecule. Similarly, in ADP-ribosylation, an ADP-ribose moiety is added to target proteins through a phosphodiester bond using NAD+ as the donor molecule. It has been shown that the N6-position of both ATP and NAD+ can be used to tag linkers without affecting the posttranslational event. If a N6-modified chloroalkane-ATP or -NAD+ is used to perform the AMPylation or ADP-ribosylation reaction, the target proteins would be modified to contain the chloroalkane-ATP or -NAD+.

[0382] The N6-modified ATP/NAD has been used in combination with click-chemistry to develop in-gel fluorescent-based detection systems. Detection of these post-translational modifications by western blotting techniques requires antibodies, which are often not specific or not available. An alternative approach could be to combine the properties of HaloTag® technology and the high luminescence of NanoLuc® luciferase (NL).

[0383] Upon post-translational modification of target proteins with chloroalkane-ATP (for AMPylation) or chloroalkane-NAD+ (for ADP-ribosylation) using either cell lysate or purified proteins, samples can be resolved by SDS-PAGE and transferred to PVDF membrane. Following blocking, the blot can be incubated with HaloTag-NLpep. HaloTag will bind to the post-translationally-modified proteins. In the next step, the NLpoly and furimazine could be added to the blot to detect the bioluminescence. This detection method is an alternative to a chemiluminescent-based approach for detection of western blots. A chemiluminescent-based approach could involve incubation HaloTag-protein G fusions (as a primary) in the next step any secondary antibody-linked to HRP could be used followed by ECL reaction.

### Example 101

### Post Translational Modification Assays

[0384] Post translational modifications (PTMs) of proteins are central to all aspects of biological regulation. PTMs amplify the diverse functions of the proteome by covalently adding functional groups to proteins. These modifications include phosphorylation, methylation, acetylation, glycosylation, ubiquitination, nitrosylation, lipidation and influence many aspects of normal cell biology and pathogenesis. More specifically, histone related PTMs are of great importance. Epigenetic covalent modifications of histone proteins have a strong effect on gene transcriptional regulation and cellular activity. Examples of post translational modification enzymes include but not limited to, Kinases/Phosphatases, Methyltransferases (HMT)/Demethylases (HDMT), Acetyltransferases/Histone Deacetylases, Glycosyltransferases/Glucanases and ADP-Ribosyl Transferases. Under normal physiological conditions, the regulation of PTM enzymes is tightly regulated. However, under pathological conditions, these enzymes activity can be dysregulated, and the disruption of the intracellular networks governed by these enzymes leads to many diseases including cancer and inflammation.

[0385] The non-luminescent peptides (NLpep) and non-luminescent polypeptides (NLpoly) of the present invention can be used to determine the activity of PMT enzymes by monitoring changes in covalent group transfer (e.g. phosphoryl, acetyl) to a specific peptide substrate linked to a NLpep of the present invention. The NLpep will be linked through peptide synthesis to small PTM enzyme specific peptide and used as a substrate for the PTM enzyme.

### A) PTM Transferase Assays (HAT)

[0386] Once the PTM enzyme reaction has occurred, an aminopeptidase can be used to degrade the non-modified peptide (NLpep; control). The methylatedmodified (acetylated) peptide (NLpep-PTM enzyme substrate) would be degraded at a very slow rate or would not be degraded at all as the aminopeptidase activity is known not to degrade to be affected by a PTM. Once the aminopeptidase reaction is complete, the NLpoly is added with the NanoGlo® assay reagent containing Furimazine Luminescence would be generated from the sample where PTM occurred via the interaction of the NLpep and NLpoly. If no PTM occurred, the NLpep would be degraded, and no interaction between the NLpep and NLpoly would occur, thereby no luminescence would be generated. This concept is exemplified in FIG. 145 for H3K4/9 acetyltransferases.

[0387] The reaction would be performed under optimal enzyme reaction condition using the histone peptide substrate linked to NLpep of the present invention and Acetyl-CoA or SAM as the acetyl or methyl group donor. A buffer containing aminopeptidase or a mixture of aminopeptidases would be added to degrade specifically all the non-modified substrates. A buffer containing a NLpoly of the present invention and an aminopeptidase inhibitor would be added. NanoGlo® assay reagent would be added, and luminescence detected. Luminescence generated would be proportional to the amount of non-degraded NLpep present, and therefore would correlate with the amount of methylated or acetylated substrates, thereby indicating the amount of methyl or acetyl transferase activity. The assay can also be applied to PTM such as phosphorylation, glycosylation, ubiquitination, nitrosylation, and lipidation.

### B) PTM Hydrolase Assays (HDMT)

[0388] In a similar concept to A) can be used for Histone Demethylases (HDMT). However, instead of an aminopeptidase, a PMT-specific antibody can be used to create activity interference. An NLpepA NLpep of the present invention could be linked through peptide synthesis to small methylated peptide and used as a substrate for the hydrolase. Once a hydrolase reaction has been completed, an anti-methyl antibody can be added to the reaction. This antibody will bind specifically to the methylated peptide (control). The peptide product generated by the HDMT will not bind to the antibody. Then, an NLpoly of the present invention can be added. If the antibody interferes with the interaction of NLpep and NLpoly, no luminescence will be generated. If there was hydrolysis of the PTM by the demethylase, the NLpep and NLpoly will interact, and luminescence will be generated. This concept is exemplified in FIG. 146 H3K4/9 demethylases.

[0389] The concept of aminopeptidase degradation of the non-modified substrate can also be used for a hydrolase assay except it would be a loss of signal assay instead of a gain of signal. The reaction would be performed under optimal enzyme reaction condition using a modified (methylated or acetylated) histone peptide substrate linked to an NLpepa NLpep of the present invention. A buffer containing an antibody capable of recognizing the methyl or acetyl group would be added. A buffer containing an NLpolya NLpoly of the present invention would be added. The NLpoly would interact with NLpep not bound to the antibody. NanoGlo® assay reagent would be added, and luminescence detected. The luminescence generated would be proportional to the amount of NLpep not bound to the antibody, and therefore would correlate with the amount of demethylated or deacetylated substrate, thereby indicating the amount of demethylase or deacetylase activity. Both hydrolase assay concepts can also be applied to PTM hydrolases such as phosphatases, glucanases and deubiquitinases.

[0390] In another version of these concepts, the PTM transfer or hydrolysis on the peptide-NLpep would be alone sufficient to reduce or enhance the interaction of NLpep with NLpoly and therefore decrease or increase the luminescence signal without the need of aminopeptidase or antibody.

### Example 102

### Detection of Specific RNAs (Noncoding RNA or mRNA) of Interest in Mammalian Cells, Cell Lysate or Clinical Sample

[0391] The non-luminescent peptide (NLpep) and non-luminescent polypeptide (NLpoly) of the present invention can be tethered to an RNA binding domain (RBD) with engineered sequence specificity. The specificity of the RBD can be changed with precision by changing unique amino acids that confers the base-specificity of the RBD. An example of one such RBD is the human pumilio domain (referred here as PUM). The RNA recognition code of PUM has been very well established. PUM is composed of eight tandem repeats (each repeat consists of 34 amino acids which folds into tightly packed domains composed of alpha helices). Conserved amino acids from the center of each repeat make specific contacts with individual bases within the RNA recognition sequence (composed of eight bases). The sequence specificity of the PUM can be altered precisely by changing the conserved amino acid (by site-directed mutagenesis) involved in base recognition within the RNA recognition sequence. For detection of specific RNAs in the cell, PUM domains (PUM1 and PUM2) with customized sequence specificities for the target RNA can be tethered to a NLpep and NLpoly of the present invention (e.g., as a genetic fusion protein via genetic engineering) and can be expressed in mammalian cells. PUM1 and PUM2 are designed to recognize 8-nucleotide sequences in the target RNA which are proximal to each other (separated by only few base pairs, determined experimentally). Optimal interaction of PUM1 and PUM2 to their target sequence is warranted by introducing a flexible linker (sequence and length of the linker to be determined experimentally) that separates the PUM and the non-luminescent peptide and non-luminescent polypeptide. Binding of the PUM1 and PUM2 to their target sequence will bring the NLpep and NLpoly into close proximity in an orientation that results in a functional complex formation capable of generating bioluminescent signal under our specific assay condition. A functional bioluminescent complex would not be generated in the absence of the RNA target due to the unstable interaction of the NLpep and NLpoly pairs that constitutes the complex.

[0392] A similar strategy can also be used for detecting RNA in clinical sample in vitro. The NLpep-PUM fusion proteins with customized RNA specificity can be expressed and purified from suitable protein expression system (such as E. coli or mammalian protein expression system). Purified components can be added to the biological sample along with suitable substrate and assay components to generate the bioluminescent signal.

### Example 103

### DNA Oligo-Based Detection of Specific RNA (Noncoding RNA or mRNA) in Clinical Sample or Mammalian Cell Lysate

[0393] A non-luminescent peptide (NLpep) and non-luminescent polypeptide (NLpoly) of the present invention can be attached to oligonucleotides complementary to the target RNA with suitable linker (amino acids or nucleotides). Functional assembly of bioluminescent complex occurs only when sequence specific hybridization of DNA oligo to their target RNA brings the NLpep and NLpoly into close proximity in an ideal conformation optimal for the generation of a bioluminescent signal under the assay conditions. The detection can also be achieved through a three-component complementation system involving two NLpeps and a third NLpoly. For example, two NLpep-DNA conjugates will be mixed with the target RNA. Functional assembly of the bioluminescent complex is achieved by subsequent addition of the third NLpoly. Thus, if a detectable signal is produced under specific assay conditions using a clinical sample or cell lysate, the presence of target RNA in such a sample is inferred. Such assays are useful for detecting RNAs derived from infectious agents (viral RNAs) and specific RNA biomarkers (implicated in many disease conditions such as various forms of cancers, liver diseases, and heart diseases), and could provide a new avenue for diagnosis and prognosis of many disease conditions.

### Example 104

### In-Vivo Imaging

[0394] Biotechnology-derived products (Biologics), including antibodies, peptides and proteins, hold great promises as therapeutics agents. Unlike small molecule drugs, biologics are large molecules with secondary and tertiary structures and often contain posttranslational modifications. Internalization, intracellular trafficking, bio-distribution, pharmacokinetics and pharmacodynamics (PK/PD), immunogenicity, etc. of biologics differ significantly from small molecule drugs, and there is a need for new tools to ‘track’ these antibodies in vivo. Conventional chemical labeling with enzyme reporters (HRP, luciferase, etc.) or small fluorescent tags can significantly alter the therapeutic value of the biologics and are not ideal for in vivo imaging using biologics. Radioisotope-labeling for PET-based imaging is also not convenient.

[0395] The NLpolys and NLpeps described herein offer a novel solution for in vivo imaging of biologics. The NLpep can be genetically encoded into a biologic therapeutics without any synthetic steps. Genetic encoding allows precise control over amount of peptide per biologic molecule as well as its position, thereby minimizing any perturbation to its therapeutic value. For imaging, a NLpoly along with substrate, e.g., furimazine, can be injected into the animal. If the NLpep-biologic and NLpoly interact, luminescence would be generated. Alternatively, a transgenic animal expressing NLpoly can be used as a model system.

### Example 105

### BRET Applications

[0396] This concept fundamentally measures three moieties coming together. Two of the NLpolys and/or NLpeps form a complex, and the third moiety, which is either fluorescent or bioluminescent, provides an energy transfer component. If the complex formed is bioluminescent, both bioluminescence and energy transfer (i.e., BRET) can be measured. If the complex formed is fluorescent, the magnitude of energy transfer can be measured if the third component is a bioluminescent molecule.

[0397] A) This example demonstrates a fluorescent dye attached to a NLpep. Alternatively, a fluorescent protein could be fused, e.g., a fusion protein, with a NLpoly or NLpep (created from a genetic construct).

[0398] E. coli clarified lysate of NLpoly WT was prepared as described previously. 40 uL NLpoly WT lysate was mixed with 10 uL of PBI-4730 (NLpep1) or PBI-4877 (NLpep1-TMR) and incubated for 10 min at RT. 50 uL 100 uM furimazine in 50 mM HEPES pH 7.4 was added and incubated for 30 min at RT. Luminescence was measured over 400-700 nm on TECAN M1000.

[0399] FIG. 147 illustrates very efficient energy transfer from the NLPoly/NLPep complex (donor) to TMR (acceptor), and the corresponding red shift in the wavelength of light being emitted.

[0400] B) This example demonstrates using the BRET in detection, such as detecting small molecule concentration or enzymatic activity. Because energy transfer is strongly dependent on distance, the magnitude of energy transfer can often be related to the conformation of the system. For instance, insertion of a polypeptide that chelates calcium can be used to measure calcium concentration through modulation of energy transfer.

[0401] An enzyme that also changes the distance, either through causing a conformational change of the sensor as above or through cleavage of the sensor from the fluorescent moiety, can be measured through a system as described herein. A NLpoly or NLpep bound to a fluorescent moiety gives energy transfer when the NLpoly and NLpep interact. One example of this is a peptide sensor that has been made wherein the NLpep is conjugated to a fluorescent TOM dye via a DEVD linker (Caspase-3 cleavage site). When exposed to the NLpoly, energy transfer is observed. When exposed to Caspase-3, energy transfer is eliminated, but luminescence at 460 nm remains.

[0402] NLpoly 5A2 and NL-HT (NanoLuc fused to HaloTag) were purified. 20 uL of 8 μM NL-HT was mixed with 20 uL of 100 nM PBI-3781 (See, e.g., U.S. patent application Ser. No. 13/682,589, herein incorporated by reference in its entirety) and incubated for 10 min at RT. 40 uL NanoGlo+100 uM furimazine was added, and luminescence measured over 300-800 nm on TECAN M1000.

[0403] 20 uL of 33 ng/uL NLpoly 5A2 was mixed with 20 uL of ˜500 uM PBI-5074 (TOM-NCT-NLpep). 40 uL NanoGlo+100 uM furimazine was added, and luminescence measured over 300-800 nm on TECAN M1000.

[0404] FIG. 148 illustrates energy transfer from the NLPoly/NLPep complex (donor) to TOM-dye (acceptor), and the corresponding red shift in the wavelength of light being emitted.

[0405] C) Ternary Interactions

[0406] The energy transfer with an NLpoly and NLpep can also be used to measure three molecules interacting. One example would be a GPCR labeled with NLpoly and a GPCR interacting protein with NLpep that forms a bioluminescent complex when they interact. This allows measurement of the binary interaction. If a small molecule GPCR ligand bearing an appropriate fluorescent moiety for energy transfer interacts with this system, energy transfer will occur. Therefore, the binary protein-protein interaction and the ternary drug-protein-protein interaction can be measured in the same experiment. Also, the fluorescent molecule only causes a signal when interacting with a protein pair, which removes any signal from the ligand interacting with an inactive protein (FIG. 149).

### Example 106

### 6-Tetramethylrhodamine-PEG3-NH₂

[0407] To a solution of 6-Tetramethylrhodamine succidimidyl ester (0.25 g, 0.5 mmol) in DMF (5 mL), 1-Boc-4,7,10-trioxamidecan-1,13-diamine (0.15 g, 0.5 mmol) was added followed by diisopropylethylamine (0.25 mL, 1.4 mmol). After stirring for 16 h, the reaction was analyzed by HPLC to confirm complete consumption of the 6-tetramethylrhodamine succidimyl ester. The reaction was concentrated to a pink film, which was dissolved in a combination of triisopropylsilane (0.2 mL) and trifluoroacetic acid (4 mL). The pink solution was stirred for 2 h, after which analytical HPLC confirmed complete consumption of starting material. The reaction was concentrated to dryness to provide crude 6-Tetramethylrhodamine-PEG3-NH2 as a pink film.

[chemical structure]

[0408] The fully protected peptide Boc-GVTGWRLCERILA-resin was synthesized by standard solid phase peptide synthesis using Fmoc techniques, then cleaved from the resin using dichloroacetic acid to liberate the fully protected peptide as a white solid. To a solution of 6-Tetramethylrhodamine-PEG3-NH2 (0.05 g, 0.08 mmol) in DMF (1.5 mL), this Boc-GVTGWRLCERILA-OH (0.2 g, 0.07 mmol), 1-hydroxyazabenzotriazole (11 mg, 0.08 mmol), 1-Ethyl-3-(3-dimethylaminopropyl)carbodiimide (15 mg, 0.08 mmol) and diisopropylethylamine (0.28 mL, 0.16 mmol) was added. After stirring for 30 min, the reaction was concentrated, and the resulting crude was partitioned between CH₂Cl₂ and water, the layers separated and the organic layer was washed with water and brine, dried over sodium sulfate and concentrated. The resulting pink solid was dissolved in a combination of triisopropylsilane (0.2 mL) and trifluoroacetic acid (4 mL). After stirring for 3 h, the reaction was concentrated, and the resulting pink film was purified with reverse phase HPLC using a gradient of ACN in 0.1% aqueous TFA to provide PBI 4877 as a pink powder: MS (M+) calcd 2088.5. found 2089.1.

[chemical structure]

[0409] The fully protected peptide H-DEVDGVTGWRLCERILA-resin was synthesized by standard solid phase peptide synthesis using Fmoc techniques. While still on the resin, a solution of 6-TOM (PBI-3739) succidimidyl ester was added and allowed to react with the free N-terminus. The peptide was then cleaved from the resin and fully deprotected using trifluoroacetic acid (TFA) to provide a blue solid. This solid was purified with reverse phase HPLC using a gradient of ACN in 0.1% aqueous TFA to provide PBI 5074 as a blue powder: MS (M+Z/2) calcd 1238.9. found 1238.8.

[0410] All publications and patents mentioned in the above specification are herein incorporated by reference. Various modifications and variations of the described method and system of the invention will be apparent to those skilled in the art without departing from the scope and spirit of the invention. Although the invention has been described in connection with specific embodiments, it should be understood that the invention as claimed should not be unduly limited to such specific embodiments. Indeed, various modifications of the described modes for carrying out the invention that are obvious to those skilled in the relevant fields are intended to be within the scope of the present invention.

1. A peptide comprising an amino acid sequence having less than 100% and greater than 40% sequence identity with SEQ ID NO: 2, wherein a detectable bioluminescent signal is produced in the presence of a substrate when the peptide contacts a polypeptide consisting of SEQ ID NO: 440.

2. The peptide of claim 1, wherein the detectable bioluminescent signal is produced in the presence of a substrate when the peptide associates with the polypeptide consisting of SEQ ID NO: 440.

3. The peptide of claim 1, wherein the peptide exhibits enhancement of one or more traits compared to a peptide of SEQ ID NO: 2, wherein the traits are selected from: affinity for the polypeptide consisting of SEQ ID NO: 440, expression, intracellular solubility, intracellular stability, and bioluminescent activity when combined with the polypeptide consisting of SEQ ID NO: 440.

4. The peptide of claim 1, wherein the amino acid sequence is selected from the peptides of Table 1.

5. The peptide of claim 1, wherein the amino acid sequence is synthetic, contains non-natural amino acids or is a peptide mimic.

6. A nucleic acid comprising a sequence coding for a peptide of claim 1.

7. A fusion polypeptide comprising the peptide of claim 1 and a first interaction polypeptide that is configured to form a complex with a second interaction polypeptide upon contact of the first interaction polypeptide and the second interaction polypeptide.

8. A nucleic acid comprising a sequence coding for a fusion polypeptide of claim 7.

9. A bioluminescent complex comprising:
(a) the fusion polypeptide of claim 7; and
(b) a second fusion polypeptide comprising:
(i) the second interaction polypeptide, and
(ii) a complement polypeptide that emits a detectable bioluminescent signal in the presence of a substrate when associated with the peptide comprising an amino acid sequence having less than 100% and greater than 40% sequence identity with SEQ ID NO: 2;
wherein the first fusion polypeptide and second fusion polypeptide are associated;
and wherein the peptide comprising an amino acid sequence having less than 100% and greater than 40% sequence identity with SEQ ID NO: 2 and the complement polypeptide are associated.

10.-17. (canceled)

18. A bioluminescent complex comprising:
(a) a peptide comprising a peptide amino acid sequence having less than 100% and greater than 40% sequence identity with SEQ ID NO: 2; and
(b) a polypeptide comprising a polypeptide amino acid sequence having less than 100% and greater than 40% sequence identity with SEQ ID NO: 440, wherein the bioluminescent complex exhibits detectable luminescence.

19. The bioluminescent complex of claim 18, wherein the peptide amino acid sequence and the polypeptide amino acid sequence are associated.

20. The bioluminescent complex of claim 18, wherein the peptide amino acid sequence is selected from the peptide sequences of Table 1.

21. The bioluminescent complex of claim 18, wherein the polypeptide amino acid sequence is selected from the polypeptide sequences of Table 2.

22. The bioluminescent complex of claim 19, wherein the peptide amino acid sequence is attached to a first interaction element that is associated with a second interaction element.

23. The bioluminescent complex of claim 22, wherein the polypeptide amino acid sequence is attached to the second interaction element.

24. The bioluminescent complex of claim 23, wherein the polypeptide amino acid sequence and peptide amino acid sequence are incapable of associating in the absence of the association of the first and second interaction elements.

25.-40. (canceled)

41. A detection reagent comprising: (a) a peptide comprising an amino acid sequence having less than 100% and greater than 40% sequence identity with SEQ ID NO: 2, wherein a detectable bioluminescent signal is produced, in the presence of a substrate, when the peptide contacts a polypeptide consisting of SEQ ID NO: 440, and (b) a substrate for a bioluminescent complex produced by said peptide and a polypeptide consisting of SEQ ID NO: 440.

The application's sequence listing, which the Patent Office published only in electronic form, follows.

SEQUENCE LISTING (2161 sequences)

SEQ ID NO: 1 - DNA, 42 bp, Artificial Sequence
  Synthetic
atgggagtgaccggctggcggctgtgcgaacgcattctggcg

SEQ ID NO: 2 - protein, 14 aa, Artificial Sequence
  Synthetic
MGVTGWRLCERILA

SEQ ID NO: 3 - DNA, 42 bp, Artificial Sequence
  Synthetic
atggacgtgaccggctggcggctgtgcgaacgcattctggcg

SEQ ID NO: 4 - protein, 14 aa, Artificial Sequence
  Synthetic
MDVTGWRLCERILA

SEQ ID NO: 5 - DNA, 42 bp, Artificial Sequence
  Synthetic
atgggagtgaccgcctggcggctgtgcgaacgcattctggcg

SEQ ID NO: 6 - protein, 14 aa, Artificial Sequence
  Synthetic
MGVTAWRLCERILA

SEQ ID NO: 7 - DNA, 42 bp, Artificial Sequence
  Synthetic
atgggagtgaccggctggcggctgtgcaagcgcattctggcg

SEQ ID NO: 8 - protein, 14 aa, Artificial Sequence
  Synthetic
MGVTGWRLCKRILA

SEQ ID NO: 9 - DNA, 42 bp, Artificial Sequence
  Synthetic
atgggagtgaccggctggcggctgtgcgaacgcattagcgcg

SEQ ID NO: 10 - protein, 14 aa, Artificial Sequence
  Synthetic
MGVTGWRLCERISA

SEQ ID NO: 11 - DNA, 42 bp, Artificial Sequence
  Synthetic
atggacgtgaccggctggcggctgtgcaagcgcattagcgcg

SEQ ID NO: 12 - protein, 14 aa, Artificial Sequence
  Synthetic
MDVTGWRLCKRISA

SEQ ID NO: 13 - DNA, 42 bp, Artificial Sequence
  Synthetic
atggacgtgaccggctggcggctgtgcaagcgcattctggcg

SEQ ID NO: 14 - protein, 14 aa, Artificial Sequence
  Synthetic
MDVTGWRLCKRILA

SEQ ID NO: 15 - DNA, 42 bp, Artificial Sequence
  Synthetic
atggacgtgaccggctggcggctgtgcgaacgcattagcgcg

SEQ ID NO: 16 - protein, 14 aa, Artificial Sequence
  Synthetic
MDVTGWRLCERISA

SEQ ID NO: 17 - DNA, 42 bp, Artificial Sequence
  Synthetic
atgggagtgaccggctggcggctgtgcaagcgcattagcgcg

SEQ ID NO: 18 - protein, 14 aa, Artificial Sequence
  Synthetic
MGVTGWRLCKRISA

SEQ ID NO: 19 - DNA, 42 bp, Artificial Sequence
  Synthetic
atgggagtgaccggctggcggctgaacgaacgcattctggcg

SEQ ID NO: 20 - protein, 14 aa, Artificial Sequence
  Synthetic
MGVTGWRLNERILA

SEQ ID NO: 21 - DNA, 42 bp, Artificial Sequence
  Synthetic
atgggagtgaccggctggcggctgcaggaacgcattctggcg

SEQ ID NO: 22 - protein, 14 aa, Artificial Sequence
  Synthetic
MGVTGWRLQERILA

SEQ ID NO: 23 - DNA, 42 bp, Artificial Sequence
  Synthetic
atgggagtgaccggctggcggctgaagaagcgccggagccgg

SEQ ID NO: 24 - protein, 14 aa, Artificial Sequence
  Synthetic
MGVTGWRLKKRRSR

SEQ ID NO: 25 - DNA, 42 bp, Artificial Sequence
  Synthetic
atgaacgtgaccggctggcggctgtgcaagcgcattagcgcg

SEQ ID NO: 26 - protein, 14 aa, Artificial Sequence
  Synthetic
MNVTGWRLCKRISA

SEQ ID NO: 27 - DNA, 42 bp, Artificial Sequence
  Synthetic
atgagcgtgaccggctggcggctgtgcaagcgcattagcgcg

SEQ ID NO: 28 - protein, 14 aa, Artificial Sequence
  Synthetic
MSVTGWRLCKRISA

SEQ ID NO: 29 - DNA, 42 bp, Artificial Sequence
  Synthetic
atggaggtgaccggctggcggctgtgcaagcgcattagcgcg

SEQ ID NO: 30 - protein, 14 aa, Artificial Sequence
  Synthetic
MEVTGWRLCKRISA

SEQ ID NO: 31 - DNA, 42 bp, Artificial Sequence
  Synthetic
atgggcgtgaccggctggcggctgtgcaagcgcattagcgcg

SEQ ID NO: 32 - protein, 14 aa, Artificial Sequence
  Synthetic
MHVTGWRLCKRISA

SEQ ID NO: 33 - DNA, 42 bp, Artificial Sequence
  Synthetic
atgggacacaccggctggcggctgtgcaagcgcattagcgcg

SEQ ID NO: 34 - protein, 14 aa, Artificial Sequence
  Synthetic
MGITGWRLCKRISA

SEQ ID NO: 35 - DNA, 42 bp, Artificial Sequence
  Synthetic
atgggagccaccggctggcggctgtgcaagcgcattagcgcg

SEQ ID NO: 36 - protein, 14 aa, Artificial Sequence
  Synthetic
MGATGWRLCKRISA

SEQ ID NO: 37 - DNA, 42 bp, Artificial Sequence
  Synthetic
atgggaaagaccggctggcggctgtgcaagcgcattagcgcg

SEQ ID NO: 38 - protein, 14 aa, Artificial Sequence
  Synthetic
MGKTGWRLCKRISA

SEQ ID NO: 39 - DNA, 42 bp, Artificial Sequence
  Synthetic
atgggacagaccggctggcggctgtgcaagcgcattagcgcg

SEQ ID NO: 40 - protein, 14 aa, Artificial Sequence
  Synthetic
MGQTGWRLCKRISA

SEQ ID NO: 41 - DNA, 42 bp, Artificial Sequence
  Synthetic
atgggaagcaccggctggcggctgtgcaagcgcattagcgcg

SEQ ID NO: 42 - protein, 14 aa, Artificial Sequence
  Synthetic
MGSTGWRLCKRISA

SEQ ID NO: 43 - DNA, 42 bp, Artificial Sequence
  Synthetic
atgggagtggtgggctggcggctgtgcaagcgcattagcgcg

SEQ ID NO: 44 - protein, 14 aa, Artificial Sequence
  Synthetic
MGVVGWRLCKRISA

SEQ ID NO: 45 - DNA, 42 bp, Artificial Sequence
  Synthetic
atgggagtgaagggctggcggctgtgcaagcgcattagcgcg

SEQ ID NO: 46 - protein, 14 aa, Artificial Sequence
  Synthetic
MGVKGWRLCKRISA

SEQ ID NO: 47 - DNA, 42 bp, Artificial Sequence
  Synthetic
atgggagtgcagggctggcggctgtgcaagcgcattagcgcg

SEQ ID NO: 48 - protein, 14 aa, Artificial Sequence
  Synthetic
MGVQGWRLCKRISA

SEQ ID NO: 49 - DNA, 42 bp, Artificial Sequence
  Synthetic
atgggagtgaccggcacccggctgtgcaagcgcattagcgcg

SEQ ID NO: 50 - protein, 14 aa, Artificial Sequence
  Synthetic
MGVTGTRLCKRISA

SEQ ID NO: 51 - DNA, 42 bp, Artificial Sequence
  Synthetic
atgggagtgaccggcaagcggctgtgcaagcgcattagcgcg

SEQ ID NO: 52 - protein, 14 aa, Artificial Sequence
  Synthetic
MGVTGKRLCKRISA

SEQ ID NO: 53 - DNA, 42 bp, Artificial Sequence
  Synthetic
atgggagtgaccggcgtgcggctgtgcaagcgcattagcgcg

SEQ ID NO: 54 - protein, 14 aa, Artificial Sequence
  Synthetic
MGVTGVRLCKRISA

SEQ ID NO: 55 - DNA, 42 bp, Artificial Sequence
  Synthetic
atgggagtgaccggctggcggcactgcaagcgcattagcgcg

SEQ ID NO: 56 - protein, 14 aa, Artificial Sequence
  Synthetic
MGVTGWRICKRISA

SEQ ID NO: 57 - DNA, 42 bp, Artificial Sequence
  Synthetic
atgggagtgaccggctggcgggtgtgcaagcgcattagcgcg

SEQ ID NO: 58 - protein, 14 aa, Artificial Sequence
  Synthetic
MGVTGWRVCKRISA

SEQ ID NO: 59 - DNA, 42 bp, Artificial Sequence
  Synthetic
atgggagtgaccggctggcggacctgcaagcgcattagcgcg

SEQ ID NO: 60 - protein, 14 aa, Artificial Sequence
  Synthetic
MGVTGWRTCKRISA

SEQ ID NO: 61 - DNA, 42 bp, Artificial Sequence
  Synthetic
atgggagtgaccggctggcggtactgcaagcgcattagcgcg

SEQ ID NO: 62 - protein, 14 aa, Artificial Sequence
  Synthetic
MGVTGWRYCKRISA

SEQ ID NO: 63 - DNA, 42 bp, Artificial Sequence
  Synthetic
atgggagtgaccggctggcggaagtgcaagcgcattagcgcg

SEQ ID NO: 64 - protein, 14 aa, Artificial Sequence
  Synthetic
MGVTGWRKCKRISA

SEQ ID NO: 65 - DNA, 42 bp, Artificial Sequence
  Synthetic
atgggagtgaccggctggcggctgaacaagcgcattagcgcg

SEQ ID NO: 66 - protein, 14 aa, Artificial Sequence
  Synthetic
MGVTGWRLNKRISA

SEQ ID NO: 67 - DNA, 42 bp, Artificial Sequence
  Synthetic
atgggagtgaccggctggcggctgaccaagcgcattagcgcg

SEQ ID NO: 68 - protein, 14 aa, Artificial Sequence
  Synthetic
MGVTGWRLTKRISA

SEQ ID NO: 69 - DNA, 42 bp, Artificial Sequence
  Synthetic
atgggagtgaccggctggcggctgtgcaagaagattagcgcg

SEQ ID NO: 70 - protein, 14 aa, Artificial Sequence
  Synthetic
MGVTGWRLCKKISA

SEQ ID NO: 71 - DNA, 42 bp, Artificial Sequence
  Synthetic
atgggagtgaccggctggcggctgtgcaagaacattagcgcg

SEQ ID NO: 72 - protein, 14 aa, Artificial Sequence
  Synthetic
MGVTGWRLCKNISA

SEQ ID NO: 73 - DNA, 42 bp, Artificial Sequence
  Synthetic
atgggagtgaccggctggcggctgtgcaagcgcgtgagcgcg

SEQ ID NO: 74 - protein, 14 aa, Artificial Sequence
  Synthetic
MGVTGWRLCKRVSA

SEQ ID NO: 75 - DNA, 42 bp, Artificial Sequence
  Synthetic
atgggagtgaccggctggcggctgtgcaagcgccagagcgcg

SEQ ID NO: 76 - protein, 14 aa, Artificial Sequence
  Synthetic
MGVTGWRLCKRQSA

SEQ ID NO: 77 - DNA, 42 bp, Artificial Sequence
  Synthetic
atgggagtgaccggctggcggctgtgcaagcgcgagagcgcg

SEQ ID NO: 78 - protein, 14 aa, Artificial Sequence
  Synthetic
MGVTGWRLCKRESA

SEQ ID NO: 79 - DNA, 42 bp, Artificial Sequence
  Synthetic
atgggagtgaccggctggcggctgtgcaagcgccggagcgcg

SEQ ID NO: 80 - protein, 14 aa, Artificial Sequence
  Synthetic
MGVTGWRLCKRRSA

SEQ ID NO: 81 - DNA, 42 bp, Artificial Sequence
  Synthetic
atgggagtgaccggctggcggctgtgcaagcgcttcagcgcg

SEQ ID NO: 82 - protein, 14 aa, Artificial Sequence
  Synthetic
MGVTGWRLCKRFSA

SEQ ID NO: 83 - DNA, 42 bp, Artificial Sequence
  Synthetic
atgggagtgaccggctggcggctgtgcaagcgcattagcaac

SEQ ID NO: 84 - protein, 14 aa, Artificial Sequence
  Synthetic
MGVTGWRLCKRISN

SEQ ID NO: 85 - DNA, 42 bp, Artificial Sequence
  Synthetic
atgggagtgaccggctggcggctgtgcaagcgcattagcacc

SEQ ID NO: 86 - protein, 14 aa, Artificial Sequence
  Synthetic
MGVTGWRLCKRIST

SEQ ID NO: 87 - DNA, 42 bp, Artificial Sequence
  Synthetic
atgggagtgaccggctggcggctgtgcaagcgcattagccgg

SEQ ID NO: 88 - protein, 14 aa, Artificial Sequence
  Synthetic
MGVTGWRLCKRISR

SEQ ID NO: 89 - DNA, 42 bp, Artificial Sequence
  Synthetic
atgggagtgaccggctggcggctgtgcaagcgcattagcctg

SEQ ID NO: 90 - protein, 14 aa, Artificial Sequence
  Synthetic
MGVTGWRLCKRISL

SEQ ID NO: 91 - DNA, 42 bp, Artificial Sequence
  Synthetic
atgggagtgaccggctggcggctgtgcaagcgcattagcgag

SEQ ID NO: 92 - protein, 14 aa, Artificial Sequence
  Synthetic
MGVTGWRLCKRISE

SEQ ID NO: 93 - DNA, 42 bp, Artificial Sequence
  Synthetic
atgggagtgaccggcttccggctgtgcaagcgcattagcgcg

SEQ ID NO: 94 - protein, 14 aa, Artificial Sequence
  Synthetic
MGVTGFRLCKRISA

SEQ ID NO: 95 - DNA, 42 bp, Artificial Sequence
  Synthetic
atgggagtgaccggctaccggctgtgcaagcgcattagcgcg

SEQ ID NO: 96 - protein, 14 aa, Artificial Sequence
  Synthetic
MGVTGYRLCKRISA

SEQ ID NO: 97 - DNA, 42 bp, Artificial Sequence
  Synthetic
atgggagtgaccggcgagcggctgtgcaagcgcattagcgcg

SEQ ID NO: 98 - protein, 14 aa, Artificial Sequence
  Synthetic
MGVTGERLCKRISA

SEQ ID NO: 99 - DNA, 42 bp, Artificial Sequence
  Synthetic
atgcaggtgaccggctggcggctgtgcaagcgcattagcgcg

SEQ ID NO: 100 - protein, 14 aa, Artificial Sequence
  Synthetic
MQVTGWRLCKRISA

SEQ ID NO: 101 - DNA, 42 bp, Artificial Sequence
  Synthetic
atgaccgtgaccggctggcggctgtgcaagcgcattagcgcg

SEQ ID NO: 102 - protein, 14 aa, Artificial Sequence
  Synthetic
MTVTGWRLCKRISA

SEQ ID NO: 103 - DNA, 42 bp, Artificial Sequence
  Synthetic
atgggagtggagggctggcggctgtgcaagcgcattagcgcg

SEQ ID NO: 104 - protein, 14 aa, Artificial Sequence
  Synthetic
MGVEGWRLCKRISA

SEQ ID NO: 105 - DNA, 42 bp, Artificial Sequence
  Synthetic
atgggagtgaccggctggcggctgttcaagcgcattagcgcg

SEQ ID NO: 106 - protein, 14 aa, Artificial Sequence
  Synthetic
MGVTGWRLFKRISA

SEQ ID NO: 107 - DNA, 42 bp, Artificial Sequence
  Synthetic
atgggagtgaccggctggcggctgtacaagcgcattagcgcg

SEQ ID NO: 108 - protein, 14 aa, Artificial Sequence
  Synthetic
MGVTGWRLYKRISA

SEQ ID NO: 109 - DNA, 42 bp, Artificial Sequence
  Synthetic
atgggagtgaccggctggcggctgagcaagcgcattagcgcg

SEQ ID NO: 110 - protein, 14 aa, Artificial Sequence
  Synthetic
MGVTGWRLSKRISA

SEQ ID NO: 111 - DNA, 42 bp, Artificial Sequence
  Synthetic
atgggagtgaccggctggcggctgggcaagcgcattagcgcg

SEQ ID NO: 112 - protein, 14 aa, Artificial Sequence
  Synthetic
MGVTGWRLHKRISA

SEQ ID NO: 113 - DNA, 42 bp, Artificial Sequence
  Synthetic
atgggagtgaccggctggcggctgatgaagcgcattagcgcg

SEQ ID NO: 114 - protein, 14 aa, Artificial Sequence
  Synthetic
MGVTGWRLMKRISA

SEQ ID NO: 115 - DNA, 42 bp, Artificial Sequence
  Synthetic
atgggagtgaccggctggcggctggccaagcgcattagcgcg

SEQ ID NO: 116 - protein, 14 aa, Artificial Sequence
  Synthetic
MGVTGWRLAKRISA

SEQ ID NO: 117 - DNA, 42 bp, Artificial Sequence
  Synthetic
atgggagtgaccggctggcggctgcagaagcgcattagcgcg

SEQ ID NO: 118 - protein, 14 aa, Artificial Sequence
  Synthetic
MGVTGWRLQKRISA

SEQ ID NO: 119 - DNA, 42 bp, Artificial Sequence
  Synthetic
atgggagtgaccggctggcggctgctgaagcgcattagcgcg

SEQ ID NO: 120 - protein, 14 aa, Artificial Sequence
  Synthetic
MGVTGWRLLKRISA

SEQ ID NO: 121 - DNA, 42 bp, Artificial Sequence
  Synthetic
atgggagtgaccggctggcggctgaagaagcgcattagcgcg

SEQ ID NO: 122 - protein, 14 aa, Artificial Sequence
  Synthetic
MGVTGWRLKKRISA

SEQ ID NO: 123 - DNA, 42 bp, Artificial Sequence
  Synthetic
atgaaccacaccggctggcggctgaacaagaaggtgagcaac

SEQ ID NO: 124 - protein, 14 aa, Artificial Sequence
  Synthetic
MNITGWRLNKKVSN

SEQ ID NO: 125 - DNA, 42 bp, Artificial Sequence
  Synthetic
atgaaccacaccggctaccggctgaacaagaaggtgagcaac

SEQ ID NO: 126 - protein, 14 aa, Artificial Sequence
  Synthetic
MNITGYRLNKKVSN

SEQ ID NO: 127 - DNA, 42 bp, Artificial Sequence
  Synthetic
atgtgcgtgaccggctggcggctgttcaagcgcattagcgcg

SEQ ID NO: 128 - protein, 14 aa, Artificial Sequence
  Synthetic
MCVTGWRLFKRISA

SEQ ID NO: 129 - DNA, 42 bp, Artificial Sequence
  Synthetic
atgcccgtgaccggctggcggctgttcaagcgcattagcgcg

SEQ ID NO: 130 - protein, 14 aa, Artificial Sequence
  Synthetic
MPVTGWRLFKRISA

SEQ ID NO: 131 - DNA, 42 bp, Artificial Sequence
  Synthetic
atgaaccacaccggctaccggctgttcaagaaggtgagcaac

SEQ ID NO: 132 - protein, 14 aa, Artificial Sequence
  Synthetic
MNITGYRLFKKVSN

SEQ ID NO: 133 - DNA, 42 bp, Artificial Sequence
  Synthetic
atgaacgtgaccggctaccggctgttcaagaaggtgagcaac

SEQ ID NO: 134 - protein, 14 aa, Artificial Sequence
  Synthetic
MNVTGYRLFKKVSN

SEQ ID NO: 135 - DNA, 42 bp, Artificial Sequence
  Synthetic
atgaacgtgaccggctggcggctgttcaagaaggtgagcaac

SEQ ID NO: 136 - protein, 14 aa, Artificial Sequence
  Synthetic
MNVTGWRLFKKVSN

SEQ ID NO: 137 - DNA, 42 bp, Artificial Sequence
  Synthetic
atgaacgtgaccggctggcggctgttcaagaagattagcaac

SEQ ID NO: 138 - protein, 14 aa, Artificial Sequence
  Synthetic
MNVTGWRLFKKISN

SEQ ID NO: 139 - DNA, 42 bp, Artificial Sequence
  Synthetic
atgaacgtgaccggctggcggctgttcaagcgcattagcaac

SEQ ID NO: 140 - protein, 14 aa, Artificial Sequence
  Synthetic
MNVTGWRLFKRISN

SEQ ID NO: 141 - DNA, 42 bp, Artificial Sequence
  Synthetic
atgggagtgaccggctggcggctgttcaagcgcattagcaac

SEQ ID NO: 142 - protein, 14 aa, Artificial Sequence
  Synthetic
MGVTGWRLFKRISN

SEQ ID NO: 143 - DNA, 42 bp, Artificial Sequence
  Synthetic
atgaacgtgaccggctggcggctgttcgaacgcattagcaac

SEQ ID NO: 144 - protein, 14 aa, Artificial Sequence
  Synthetic
MNVTGWRLFERISN

SEQ ID NO: 145 - DNA, 42 bp, Artificial Sequence
  Synthetic
atgaacgtgaccggctggcggctgttcaagcgcattctgaac

SEQ ID NO: 146 - protein, 14 aa, Artificial Sequence
  Synthetic
MNVTGWRLFKRILN

SEQ ID NO: 147 - DNA, 42 bp, Artificial Sequence
  Synthetic
atgaacgtgaccggctggcggctgttcaagcgcattagcgcg

SEQ ID NO: 148 - protein, 14 aa, Artificial Sequence
  Synthetic
MNVTGWRLFKRISA

SEQ ID NO: 149 - DNA, 42 bp, Artificial Sequence
  Synthetic
atgaacgtgaccggctggcggctgttcgaaaagattagcaac

SEQ ID NO: 150 - protein, 14 aa, Artificial Sequence
  Synthetic
MNVTGWRLFEKISN

SEQ ID NO: 151 - DNA, 42 bp, Artificial Sequence
  Synthetic
atgaacgtgagcggctggcggctgttcgaaaagattagcaac

SEQ ID NO: 152 - protein, 14 aa, Artificial Sequence
  Synthetic
MNVSGWRLFEKISN

SEQ ID NO: 153 - DNA, 39 bp, Artificial Sequence
  Synthetic
atggtgaccggctggcggctgttcaagaagattagcaac

SEQ ID NO: 154 - protein, 13 aa, Artificial Sequence
  Synthetic
MVTGWRLFKKISN

SEQ ID NO: 155 - DNA, 42 bp, Artificial Sequence
  Synthetic
atgaacgtgagcggctggcggctgttcaagaagattagcaac

SEQ ID NO: 156 - protein, 14 aa, Artificial Sequence
  Synthetic
MNVSGWRLFKKISN

SEQ ID NO: 157 - DNA, 42 bp, Artificial Sequence
  Synthetic
atgaacgtgaccggctaccggctgttcaagaagattagcaac

SEQ ID NO: 158 - protein, 14 aa, Artificial Sequence
  Synthetic
MNVTGYRLFKKISN

SEQ ID NO: 159 - DNA, 39 bp, Artificial Sequence
  Synthetic
atggtgagcggctggcggctgttcaagaagattagcaac

SEQ ID NO: 160 - protein, 13 aa, Artificial Sequence
  Synthetic
MVSGWRLFKKISN

SEQ ID NO: 161 - DNA, 36 bp, Artificial Sequence
  Synthetic
atgagcggctggcggctgttcaagaagattagcaac

SEQ ID NO: 162 - protein, 12 aa, Artificial Sequence
  Synthetic
MSGWRLFKKISN

SEQ ID NO: 163 - DNA, 33 bp, Artificial Sequence
  Synthetic
atgggctggcggctgttcaagaagattagcaac

SEQ ID NO: 164 - protein, 11 aa, Artificial Sequence
  Synthetic
MGWRLFKKISN

SEQ ID NO: 165 - DNA, 39 bp, Artificial Sequence
  Synthetic
atgaacgtgagcggctggcggctgttcaagaagattagc

SEQ ID NO: 166 - protein, 13 aa, Artificial Sequence
  Synthetic
MNVSGWRLFKKIS

SEQ ID NO: 167 - DNA, 36 bp, Artificial Sequence
  Synthetic
atgaacgtgagcggctggcggctgttcaagaagatt

SEQ ID NO: 168 - protein, 12 aa, Artificial Sequence
  Synthetic
MNVSGWRLFKKI

SEQ ID NO: 169 - DNA, 33 bp, Artificial Sequence
  Synthetic
atgaacgtgagcggctggcggctgttcaagaag

SEQ ID NO: 170 - protein, 11 aa, Artificial Sequence
  Synthetic
MNVSGWRLFKK

SEQ ID NO: 171 - DNA, 36 bp, Artificial Sequence
  Synthetic
atggtgagcggctggcggctgttcaagaagattagc

SEQ ID NO: 172 - protein, 12 aa, Artificial Sequence
  Synthetic
MVSGWRLFKKIS

SEQ ID NO: 173 - DNA, 30 bp, Artificial Sequence
  Synthetic
atgagcggctggcggctgttcaagaagatt

SEQ ID NO: 174 - protein, 10 aa, Artificial Sequence
  Synthetic
MSGWRLFKKI

SEQ ID NO: 175 - DNA, 42 bp, Artificial Sequence
  Synthetic
atgaacgtgagcggctggggcctgttcaagaagattagcaac

SEQ ID NO: 176 - protein, 14 aa, Artificial Sequence
  Synthetic
MNVSGWGLFKKISN

SEQ ID NO: 177 - DNA, 42 bp, Artificial Sequence
  Synthetic
atgcccgtgagcggctggcggctgttcaagaagattagcaac

SEQ ID NO: 178 - protein, 14 aa, Artificial Sequence
  Synthetic
MPVSGWRLFKKISN

SEQ ID NO: 179 - DNA, 45 bp, Artificial Sequence
  Synthetic
atgaaccccgtgagcggctggcggctgttcaagaagattagcaac

SEQ ID NO: 180 - protein, 15 aa, Artificial Sequence
  Synthetic
MNPVSGWRLFKKISN

SEQ ID NO: 181 - DNA, 48 bp, Artificial Sequence
  Synthetic
atgatcaaccccgtgagcggctggcggctgttcaagaagattagcaac

SEQ ID NO: 182 - protein, 16 aa, Artificial Sequence
  Synthetic
MINPVSGWRLFKKISN

SEQ ID NO: 183 - DNA, 51 bp, Artificial Sequence
  Synthetic
atgaccatcaaccccgtgagcggctggcggctgttcaagaagattagcaac

SEQ ID NO: 184 - protein, 17 aa, Artificial Sequence
  Synthetic
MTINPVSGWRLFKKISN

SEQ ID NO: 185 - DNA, 54 bp, Artificial Sequence
  Synthetic
atggtgaccatcaaccccgtgagcggctggcggctgttcaagaagattagcaac

SEQ ID NO: 186 - protein, 18 aa, Artificial Sequence
  Synthetic
MVTINPVSGWRLFKKISN

SEQ ID NO: 187 - DNA, 57 bp, Artificial Sequence
  Synthetic
atgcgggtgaccatcaaccccgtgagcggctggcggctgttcaagaagattagcaac

SEQ ID NO: 188 - protein, 19 aa, Artificial Sequence
  Synthetic
MRVTINPVSGWRLFKKISN

SEQ ID NO: 189 - DNA, 30 bp, Artificial Sequence
  Synthetic
atgagcggctggcggctgctgaagaagatt

SEQ ID NO: 190 - protein, 10 aa, Artificial Sequence
  Synthetic
MSGWRLLKKI

SEQ ID NO: 191 - DNA, 30 bp, Artificial Sequence
  Synthetic
atgaccggctaccggctgctgaagaagatt

SEQ ID NO: 192 - protein, 10 aa, Artificial Sequence
  Synthetic
MTGYRLLKKI

SEQ ID NO: 193 - DNA, 27 bp, Artificial Sequence
  Synthetic
atgagcggctggcggctgttcaagaag

SEQ ID NO: 194 - protein, 9 aa, Artificial Sequence
  Synthetic
MSGWRLFKK

SEQ ID NO: 195 - DNA, 36 bp, Artificial Sequence
  Synthetic
atggtgaccggctaccggctgttcaagaagattagc

SEQ ID NO: 196 - protein, 12 aa, Artificial Sequence
  Synthetic
MVTGYRLFKKIS

SEQ ID NO: 197 - DNA, 36 bp, Artificial Sequence
  Synthetic
atggtgaccggctaccggctgttcgagaagattagc

SEQ ID NO: 198 - protein, 12 aa, Artificial Sequence
  Synthetic
MVTGYRLFEKIS

SEQ ID NO: 199 - DNA, 36 bp, Artificial Sequence
  Synthetic
atggtgaccggctaccggctgttcgagcagattagc

SEQ ID NO: 200 - protein, 12 aa, Artificial Sequence
  Synthetic
MVTGYRLFEQIS

SEQ ID NO: 201 - DNA, 36 bp, Artificial Sequence
  Synthetic
atggtgaccggctaccggctgttcgagaaggagagc

SEQ ID NO: 202 - protein, 12 aa, Artificial Sequence
  Synthetic
MVTGYRLFEKES

SEQ ID NO: 203 - DNA, 36 bp, Artificial Sequence
  Synthetic
atggtgaccggctaccggctgttcgagcaggagagc

SEQ ID NO: 204 - protein, 12 aa, Artificial Sequence
  Synthetic
MVTGYRLFEQES

SEQ ID NO: 205 - DNA, 36 bp, Artificial Sequence
  Synthetic
atggtgaccggctaccggctgttcgagcaggagctg

SEQ ID NO: 206 - protein, 12 aa, Artificial Sequence
  Synthetic
MVTGYRLFEQEL

SEQ ID NO: 207 - DNA, 36 bp, Artificial Sequence
  Synthetic
atggtggagggctaccggctgttcgagaagattagc

SEQ ID NO: 208 - protein, 12 aa, Artificial Sequence
  Synthetic
MVEGYRLFEKIS

SEQ ID NO: 209 - DNA, 36 bp, Artificial Sequence
  Synthetic
atggtggagggctaccggctgttcgagcagattagc

SEQ ID NO: 210 - protein, 12 aa, Artificial Sequence
  Synthetic
MVEGYRLFEQIS

SEQ ID NO: 211 - DNA, 36 bp, Artificial Sequence
  Synthetic
atggtggagggctaccggctgttcgagaaggagagc

SEQ ID NO: 212 - protein, 12 aa, Artificial Sequence
  Synthetic
MVEGYRLFEKES

SEQ ID NO: 213 - DNA, 36 bp, Artificial Sequence
  Synthetic
atggtggagggctaccggctgttcgagcaggagagc

SEQ ID NO: 214 - protein, 12 aa, Artificial Sequence
  Synthetic
MVEGYRLFEQES

SEQ ID NO: 215 - DNA, 36 bp, Artificial Sequence
  Synthetic
atggtggagggctaccggctgttcgagcaggagctg

SEQ ID NO: 216 - protein, 12 aa, Artificial Sequence
  Synthetic
MVEGYRLFEQEL

SEQ ID NO: 217 - DNA, 36 bp, Artificial Sequence
  Synthetic
atgattagcggctggcggctgatgaagaacattagc

SEQ ID NO: 218 - protein, 12 aa, Artificial Sequence
  Synthetic
MISGWRLMKNIS

SEQ ID NO: 219 - DNA, 36 bp, Artificial Sequence
  Synthetic
atggtggagggctaccggctgttcaagaagattagc

SEQ ID NO: 220 - protein, 12 aa, Artificial Sequence
  Synthetic
MVEGYRLFKKIS

SEQ ID NO: 221 - DNA, 39 bp, Artificial Sequence
  Synthetic
gacgtgaccggctggcggctgtgcgaacgcattctggcg

SEQ ID NO: 222 - protein, 13 aa, Artificial Sequence
  Synthetic
DVTGWRLCERILA

SEQ ID NO: 223 - DNA, 39 bp, Artificial Sequence
  Synthetic
ggagtgaccgcctggcggctgtgcgaacgcattctggcg

SEQ ID NO: 224 - protein, 13 aa, Artificial Sequence
  Synthetic
GVTAWRLCERILA

SEQ ID NO: 225 - DNA, 39 bp, Artificial Sequence
  Synthetic
ggagtgaccggctggcggctgtgcaagcgcattctggcg

SEQ ID NO: 226 - protein, 13 aa, Artificial Sequence
  Synthetic
GVTGWRLCKRILA

SEQ ID NO: 227 - DNA, 39 bp, Artificial Sequence
  Synthetic
ggagtgaccggctggcggctgtgcgaacgcattagcgcg

SEQ ID NO: 228 - protein, 13 aa, Artificial Sequence
  Synthetic
GVTGWRLCERISA

SEQ ID NO: 229 - DNA, 39 bp, Artificial Sequence
  Synthetic
gacgtgaccggctggcggctgtgcaagcgcattagcgcg

SEQ ID NO: 230 - protein, 13 aa, Artificial Sequence
  Synthetic
DVTGWRLCKRISA

SEQ ID NO: 231 - DNA, 39 bp, Artificial Sequence
  Synthetic
gacgtgaccggctggcggctgtgcaagcgcattctggcg

SEQ ID NO: 232 - protein, 13 aa, Artificial Sequence
  Synthetic
DVTGWRLCKRILA

SEQ ID NO: 233 - DNA, 39 bp, Artificial Sequence
  Synthetic
gacgtgaccggctggcggctgtgcgaacgcattagcgcg

SEQ ID NO: 234 - protein, 13 aa, Artificial Sequence
  Synthetic
DVTGWRLCERISA

SEQ ID NO: 235 - DNA, 39 bp, Artificial Sequence
  Synthetic
ggagtgaccggctggcggctgtgcaagcgcattagcgcg

SEQ ID NO: 236 - protein, 13 aa, Artificial Sequence
  Synthetic
GVTGWRLCKRISA

SEQ ID NO: 237 - DNA, 39 bp, Artificial Sequence
  Synthetic
ggagtgaccggctggcggctgaacgaacgcattctggcg

SEQ ID NO: 238 - protein, 13 aa, Artificial Sequence
  Synthetic
GVTGWRLNERILA

SEQ ID NO: 239 - DNA, 39 bp, Artificial Sequence
  Synthetic
ggagtgaccggctggcggctgcaggaacgcattctggcg

SEQ ID NO: 240 - protein, 13 aa, Artificial Sequence
  Synthetic
GVTGWRLQERILA

SEQ ID NO: 241 - DNA, 39 bp, Artificial Sequence
  Synthetic
ggagtgaccggctggcggctgaagaagcgccggagccgg

SEQ ID NO: 242 - protein, 13 aa, Artificial Sequence
  Synthetic
GVTGWRLKKRRSR

SEQ ID NO: 243 - DNA, 39 bp, Artificial Sequence
  Synthetic
aacgtgaccggctggcggctgtgcaagcgcattagcgcg

SEQ ID NO: 244 - protein, 13 aa, Artificial Sequence
  Synthetic
NVTGWRLCKRISA

SEQ ID NO: 245 - DNA, 39 bp, Artificial Sequence
  Synthetic
agcgtgaccggctggcggctgtgcaagcgcattagcgcg

SEQ ID NO: 246 - protein, 13 aa, Artificial Sequence
  Synthetic
SVTGWRLCKRISA

SEQ ID NO: 247 - DNA, 39 bp, Artificial Sequence
  Synthetic
gaggtgaccggctggcggctgtgcaagcgcattagcgcg

SEQ ID NO: 248 - protein, 13 aa, Artificial Sequence
  Synthetic
EVTGWRLCKRISA

SEQ ID NO: 249 - DNA, 39 bp, Artificial Sequence
  Synthetic
ggcgtgaccggctggcggctgtgcaagcgcattagcgcg

SEQ ID NO: 250 - protein, 13 aa, Artificial Sequence
  Synthetic
HVTGWRLCKRISA

SEQ ID NO: 251 - DNA, 39 bp, Artificial Sequence
  Synthetic
ggacacaccggctggcggctgtgcaagcgcattagcgcg

SEQ ID NO: 252 - protein, 13 aa, Artificial Sequence
  Synthetic
GITGWRLCKRISA

SEQ ID NO: 253 - DNA, 39 bp, Artificial Sequence
  Synthetic
ggagccaccggctggcggctgtgcaagcgcattagcgcg

SEQ ID NO: 254 - protein, 13 aa, Artificial Sequence
  Synthetic
GATGWRLCKRISA

SEQ ID NO: 255 - DNA, 39 bp, Artificial Sequence
  Synthetic
ggaaagaccggctggcggctgtgcaagcgcattagcgcg

SEQ ID NO: 256 - protein, 13 aa, Artificial Sequence
  Synthetic
GKTGWRLCKRISA

SEQ ID NO: 257 - DNA, 39 bp, Artificial Sequence
  Synthetic
ggacagaccggctggcggctgtgcaagcgcattagcgcg

SEQ ID NO: 258 - protein, 13 aa, Artificial Sequence
  Synthetic
GQTGWRLCKRISA

SEQ ID NO: 259 - DNA, 39 bp, Artificial Sequence
  Synthetic
ggaagcaccggctggcggctgtgcaagcgcattagcgcg

SEQ ID NO: 260 - protein, 13 aa, Artificial Sequence
  Synthetic
GSTGWRLCKRISA

SEQ ID NO: 261 - DNA, 39 bp, Artificial Sequence
  Synthetic
ggagtggtgggctggcggctgtgcaagcgcattagcgcg

SEQ ID NO: 262 - protein, 13 aa, Artificial Sequence
  Synthetic
GVVGWRLCKRISA

SEQ ID NO: 263 - DNA, 39 bp, Artificial Sequence
  Synthetic
ggagtgaagggctggcggctgtgcaagcgcattagcgcg

SEQ ID NO: 264 - protein, 13 aa, Artificial Sequence
  Synthetic
GVKGWRLCKRISA

SEQ ID NO: 265 - DNA, 39 bp, Artificial Sequence
  Synthetic
ggagtgcagggctggcggctgtgcaagcgcattagcgcg

SEQ ID NO: 266 - protein, 13 aa, Artificial Sequence
  Synthetic
GVQGWRLCKRISA

SEQ ID NO: 267 - DNA, 39 bp, Artificial Sequence
  Synthetic
ggagtgaccggcacccggctgtgcaagcgcattagcgcg

SEQ ID NO: 268 - protein, 13 aa, Artificial Sequence
  Synthetic
GVTGTRLCKRISA

SEQ ID NO: 269 - DNA, 39 bp, Artificial Sequence
  Synthetic
ggagtgaccggcaagcggctgtgcaagcgcattagcgcg

SEQ ID NO: 270 - protein, 13 aa, Artificial Sequence
  Synthetic
GVTGKRLCKRISA

SEQ ID NO: 271 - DNA, 39 bp, Artificial Sequence
  Synthetic
ggagtgaccggcgtgcggctgtgcaagcgcattagcgcg

SEQ ID NO: 272 - protein, 13 aa, Artificial Sequence
  Synthetic
GVTGVRLCKRISA

SEQ ID NO: 273 - DNA, 39 bp, Artificial Sequence
  Synthetic
ggagtgaccggctggcggcactgcaagcgcattagcgcg

SEQ ID NO: 274 - protein, 13 aa, Artificial Sequence
  Synthetic
GVTGWRICKRISA

SEQ ID NO: 275 - DNA, 39 bp, Artificial Sequence
  Synthetic
ggagtgaccggctggcgggtgtgcaagcgcattagcgcg

SEQ ID NO: 276 - protein, 13 aa, Artificial Sequence
  Synthetic
GVTGWRVCKRISA

SEQ ID NO: 277 - DNA, 39 bp, Artificial Sequence
  Synthetic
ggagtgaccggctggcggacctgcaagcgcattagcgcg

SEQ ID NO: 278 - protein, 13 aa, Artificial Sequence
  Synthetic
GVTGWRTCKRISA

SEQ ID NO: 279 - DNA, 39 bp, Artificial Sequence
  Synthetic
ggagtgaccggctggcggtactgcaagcgcattagcgcg

SEQ ID NO: 280 - protein, 13 aa, Artificial Sequence
  Synthetic
GVTGWRYCKRISA

SEQ ID NO: 281 - DNA, 39 bp, Artificial Sequence
  Synthetic
ggagtgaccggctggcggaagtgcaagcgcattagcgcg

SEQ ID NO: 282 - protein, 13 aa, Artificial Sequence
  Synthetic
GVTGWRKCKRISA

SEQ ID NO: 283 - DNA, 39 bp, Artificial Sequence
  Synthetic
ggagtgaccggctggcggctgaacaagcgcattagcgcg

SEQ ID NO: 284 - protein, 13 aa, Artificial Sequence
  Synthetic
GVTGWRLNKRISA

SEQ ID NO: 285 - DNA, 39 bp, Artificial Sequence
  Synthetic
ggagtgaccggctggcggctgaccaagcgcattagcgcg

SEQ ID NO: 286 - protein, 13 aa, Artificial Sequence
  Synthetic
GVTGWRLTKRISA

SEQ ID NO: 287 - DNA, 39 bp, Artificial Sequence
  Synthetic
ggagtgaccggctggcggctgtgcaagaagattagcgcg

SEQ ID NO: 288 - protein, 13 aa, Artificial Sequence
  Synthetic
GVTGWRLCKKISA

SEQ ID NO: 289 - DNA, 39 bp, Artificial Sequence
  Synthetic
ggagtgaccggctggcggctgtgcaagaacattagcgcg

SEQ ID NO: 290 - protein, 13 aa, Artificial Sequence
  Synthetic
GVTGWRLCKNISA

SEQ ID NO: 291 - DNA, 39 bp, Artificial Sequence
  Synthetic
ggagtgaccggctggcggctgtgcaagcgcgtgagcgcg

SEQ ID NO: 292 - protein, 13 aa, Artificial Sequence
  Synthetic
GVTGWRLCKRVSA

SEQ ID NO: 293 - DNA, 39 bp, Artificial Sequence
  Synthetic
ggagtgaccggctggcggctgtgcaagcgccagagcgcg

SEQ ID NO: 294 - protein, 13 aa, Artificial Sequence
  Synthetic
GVTGWRLCKRQSA

SEQ ID NO: 295 - DNA, 39 bp, Artificial Sequence
  Synthetic
ggagtgaccggctggcggctgtgcaagcgcgagagcgcg

SEQ ID NO: 296 - protein, 13 aa, Artificial Sequence
  Synthetic
GVTGWRLCKRESA

SEQ ID NO: 297 - DNA, 39 bp, Artificial Sequence
  Synthetic
ggagtgaccggctggcggctgtgcaagcgccggagcgcg

SEQ ID NO: 298 - protein, 13 aa, Artificial Sequence
  Synthetic
GVTGWRLCKRRSA

SEQ ID NO: 299 - DNA, 39 bp, Artificial Sequence
  Synthetic
ggagtgaccggctggcggctgtgcaagcgcttcagcgcg

SEQ ID NO: 300 - protein, 13 aa, Artificial Sequence
  Synthetic
GVTGWRLCKRFSA

SEQ ID NO: 301 - DNA, 39 bp, Artificial Sequence
  Synthetic
ggagtgaccggctggcggctgtgcaagcgcattagcaac

SEQ ID NO: 302 - protein, 13 aa, Artificial Sequence
  Synthetic
GVTGWRLCKRISN

SEQ ID NO: 303 - DNA, 39 bp, Artificial Sequence
  Synthetic
ggagtgaccggctggcggctgtgcaagcgcattagcacc

SEQ ID NO: 304 - protein, 13 aa, Artificial Sequence
  Synthetic
GVTGWRLCKRIST

SEQ ID NO: 305 - DNA, 39 bp, Artificial Sequence
  Synthetic
ggagtgaccggctggcggctgtgcaagcgcattagccgg

SEQ ID NO: 306 - protein, 13 aa, Artificial Sequence
  Synthetic
GVTGWRLCKRISR

SEQ ID NO: 307 - DNA, 39 bp, Artificial Sequence
  Synthetic
ggagtgaccggctggcggctgtgcaagcgcattagcctg

SEQ ID NO: 308 - protein, 13 aa, Artificial Sequence
  Synthetic
GVTGWRLCKRISL

SEQ ID NO: 309 - DNA, 39 bp, Artificial Sequence
  Synthetic
ggagtgaccggctggcggctgtgcaagcgcattagcgag

SEQ ID NO: 310 - protein, 13 aa, Artificial Sequence
  Synthetic
GVTGWRLCKRISE

SEQ ID NO: 311 - DNA, 39 bp, Artificial Sequence
  Synthetic
ggagtgaccggcttccggctgtgcaagcgcattagcgcg

SEQ ID NO: 312 - protein, 13 aa, Artificial Sequence
  Synthetic
GVTGFRLCKRISA

SEQ ID NO: 313 - DNA, 39 bp, Artificial Sequence
  Synthetic
ggagtgaccggctaccggctgtgcaagcgcattagcgcg

SEQ ID NO: 314 - protein, 13 aa, Artificial Sequence
  Synthetic
GVTGYRLCKRISA

SEQ ID NO: 315 - DNA, 39 bp, Artificial Sequence
  Synthetic
ggagtgaccggcgagcggctgtgcaagcgcattagcgcg

SEQ ID NO: 316 - protein, 13 aa, Artificial Sequence
  Synthetic
GVTGERLCKRISA

SEQ ID NO: 317 - DNA, 39 bp, Artificial Sequence
  Synthetic
caggtgaccggctggcggctgtgcaagcgcattagcgcg

SEQ ID NO: 318 - protein, 13 aa, Artificial Sequence
  Synthetic
QVTGWRLCKRISA

SEQ ID NO: 319 - DNA, 39 bp, Artificial Sequence
  Synthetic
accgtgaccggctggcggctgtgcaagcgcattagcgcg

SEQ ID NO: 320 - protein, 13 aa, Artificial Sequence
  Synthetic
TVTGWRLCKRISA

SEQ ID NO: 321 - DNA, 39 bp, Artificial Sequence
  Synthetic
ggagtggagggctggcggctgtgcaagcgcattagcgcg

SEQ ID NO: 322 - protein, 13 aa, Artificial Sequence
  Synthetic
GVEGWRLCKRISA

SEQ ID NO: 323 - DNA, 39 bp, Artificial Sequence
  Synthetic
ggagtgaccggctggcggctgttcaagcgcattagcgcg

SEQ ID NO: 324 - protein, 13 aa, Artificial Sequence
  Synthetic
GVTGWRLFKRISA

SEQ ID NO: 325 - DNA, 39 bp, Artificial Sequence
  Synthetic
ggagtgaccggctggcggctgtacaagcgcattagcgcg

SEQ ID NO: 326 - protein, 13 aa, Artificial Sequence
  Synthetic
GVTGWRLYKRISA

SEQ ID NO: 327 - DNA, 39 bp, Artificial Sequence
  Synthetic
ggagtgaccggctggcggctgagcaagcgcattagcgcg

SEQ ID NO: 328 - protein, 13 aa, Artificial Sequence
  Synthetic
GVTGWRLSKRISA

SEQ ID NO: 329 - DNA, 39 bp, Artificial Sequence
  Synthetic
ggagtgaccggctggcggctgggcaagcgcattagcgcg

SEQ ID NO: 330 - protein, 13 aa, Artificial Sequence
  Synthetic
GVTGWRLHKRISA

SEQ ID NO: 331 - DNA, 39 bp, Artificial Sequence
  Synthetic
ggagtgaccggctggcggctgatgaagcgcattagcgcg

SEQ ID NO: 332 - protein, 13 aa, Artificial Sequence
  Synthetic
GVTGWRLMKRISA

SEQ ID NO: 333 - DNA, 39 bp, Artificial Sequence
  Synthetic
ggagtgaccggctggcggctggccaagcgcattagcgcg

SEQ ID NO: 334 - protein, 13 aa, Artificial Sequence
  Synthetic
GVTGWRLAKRISA

SEQ ID NO: 335 - DNA, 39 bp, Artificial Sequence
  Synthetic
ggagtgaccggctggcggctgcagaagcgcattagcgcg

SEQ ID NO: 336 - protein, 13 aa, Artificial Sequence
  Synthetic
GVTGWRLQKRISA

SEQ ID NO: 337 - DNA, 39 bp, Artificial Sequence
  Synthetic
ggagtgaccggctggcggctgctgaagcgcattagcgcg

SEQ ID NO: 338 - protein, 13 aa, Artificial Sequence
  Synthetic
GVTGWRLLKRISA

SEQ ID NO: 339 - DNA, 39 bp, Artificial Sequence
  Synthetic
ggagtgaccggctggcggctgaagaagcgcattagcgcg

SEQ ID NO: 340 - protein, 13 aa, Artificial Sequence
  Synthetic
GVTGWRLKKRISA

SEQ ID NO: 341 - DNA, 39 bp, Artificial Sequence
  Synthetic
aaccacaccggctggcggctgaacaagaaggtgagcaac

SEQ ID NO: 342 - protein, 13 aa, Artificial Sequence
  Synthetic
NITGWRLNKKVSN

SEQ ID NO: 343 - DNA, 39 bp, Artificial Sequence
  Synthetic
aaccacaccggctaccggctgaacaagaaggtgagcaac

SEQ ID NO: 344 - protein, 13 aa, Artificial Sequence
  Synthetic
NITGYRLNKKVSN

SEQ ID NO: 345 - DNA, 39 bp, Artificial Sequence
  Synthetic
tgcgtgaccggctggcggctgttcaagcgcattagcgcg

SEQ ID NO: 346 - protein, 13 aa, Artificial Sequence
  Synthetic
CVTGWRLFKRISA

SEQ ID NO: 347 - DNA, 39 bp, Artificial Sequence
  Synthetic
cccgtgaccggctggcggctgttcaagcgcattagcgcg

SEQ ID NO: 348 - protein, 13 aa, Artificial Sequence
  Synthetic
PVTGWRLFKRISA

SEQ ID NO: 349 - DNA, 39 bp, Artificial Sequence
  Synthetic
aaccacaccggctaccggctgttcaagaaggtgagcaac

SEQ ID NO: 350 - protein, 13 aa, Artificial Sequence
  Synthetic
NITGYRLFKKVSN

SEQ ID NO: 351 - DNA, 39 bp, Artificial Sequence
  Synthetic
aacgtgaccggctaccggctgttcaagaaggtgagcaac

SEQ ID NO: 352 - protein, 13 aa, Artificial Sequence
  Synthetic
NVTGYRLFKKVSN

SEQ ID NO: 353 - DNA, 39 bp, Artificial Sequence
  Synthetic
aacgtgaccggctggcggctgttcaagaaggtgagcaac

SEQ ID NO: 354 - protein, 13 aa, Artificial Sequence
  Synthetic
NVTGWRLFKKVSN

SEQ ID NO: 355 - DNA, 39 bp, Artificial Sequence
  Synthetic
aacgtgaccggctggcggctgttcaagaagattagcaac

SEQ ID NO: 356 - protein, 13 aa, Artificial Sequence
  Synthetic
NVTGWRLFKKISN

SEQ ID NO: 357 - DNA, 39 bp, Artificial Sequence
  Synthetic
aacgtgaccggctggcggctgttcaagcgcattagcaac

SEQ ID NO: 358 - protein, 13 aa, Artificial Sequence
  Synthetic
NVTGWRLFKRISN

SEQ ID NO: 359 - DNA, 39 bp, Artificial Sequence
  Synthetic
ggagtgaccggctggcggctgttcaagcgcattagcaac

SEQ ID NO: 360 - protein, 13 aa, Artificial Sequence
  Synthetic
GVTGWRLFKRISN

SEQ ID NO: 361 - DNA, 39 bp, Artificial Sequence
  Synthetic
aacgtgaccggctggcggctgttcgaacgcattagcaac

SEQ ID NO: 362 - protein, 13 aa, Artificial Sequence
  Synthetic
NVTGWRLFERISN

SEQ ID NO: 363 - DNA, 39 bp, Artificial Sequence
  Synthetic
aacgtgaccggctggcggctgttcaagcgcattctgaac

SEQ ID NO: 364 - protein, 13 aa, Artificial Sequence
  Synthetic
NVTGWRLFKRILN

SEQ ID NO: 365 - DNA, 39 bp, Artificial Sequence
  Synthetic
aacgtgaccggctggcggctgttcaagcgcattagcgcg

SEQ ID NO: 366 - protein, 13 aa, Artificial Sequence
  Synthetic
NVTGWRLFKRISA

SEQ ID NO: 367 - DNA, 39 bp, Artificial Sequence
  Synthetic
aacgtgaccggctggcggctgttcgaaaagattagcaac

SEQ ID NO: 368 - protein, 13 aa, Artificial Sequence
  Synthetic
NVTGWRLFEKISN

SEQ ID NO: 369 - DNA, 39 bp, Artificial Sequence
  Synthetic
aacgtgagcggctggcggctgttcgaaaagattagcaac

SEQ ID NO: 370 - protein, 13 aa, Artificial Sequence
  Synthetic
NVSGWRLFEKISN

SEQ ID NO: 371 - DNA, 36 bp, Artificial Sequence
  Synthetic
gtgaccggctggcggctgttcaagaagattagcaac

SEQ ID NO: 372 - protein, 12 aa, Artificial Sequence
  Synthetic
VTGWRLFKKISN

SEQ ID NO: 373 - DNA, 39 bp, Artificial Sequence
  Synthetic
aacgtgagcggctggcggctgttcaagaagattagcaac

SEQ ID NO: 374 - protein, 13 aa, Artificial Sequence
  Synthetic
NVSGWRLFKKISN

SEQ ID NO: 375 - DNA, 39 bp, Artificial Sequence
  Synthetic
aacgtgaccggctaccggctgttcaagaagattagcaac

SEQ ID NO: 376 - protein, 13 aa, Artificial Sequence
  Synthetic
NVTGYRLFKKISN

SEQ ID NO: 377 - DNA, 36 bp, Artificial Sequence
  Synthetic
gtgagcggctggcggctgttcaagaagattagcaac

SEQ ID NO: 378 - protein, 12 aa, Artificial Sequence
  Synthetic
VSGWRLFKKISN

SEQ ID NO: 379 - DNA, 33 bp, Artificial Sequence
  Synthetic
agcggctggcggctgttcaagaagattagcaac

SEQ ID NO: 380 - protein, 11 aa, Artificial Sequence
  Synthetic
SGWRLFKKISN

SEQ ID NO: 381 - DNA, 30 bp, Artificial Sequence
  Synthetic
ggctggcggctgttcaagaagattagcaac

SEQ ID NO: 382 - protein, 10 aa, Artificial Sequence
  Synthetic
GWRLFKKISN

SEQ ID NO: 383 - DNA, 36 bp, Artificial Sequence
  Synthetic
aacgtgagcggctggcggctgttcaagaagattagc

SEQ ID NO: 384 - protein, 12 aa, Artificial Sequence
  Synthetic
NVSGWRLFKKIS

SEQ ID NO: 385 - DNA, 33 bp, Artificial Sequence
  Synthetic
aacgtgagcggctggcggctgttcaagaagatt

SEQ ID NO: 386 - protein, 11 aa, Artificial Sequence
  Synthetic
NVSGWRLFKKI

SEQ ID NO: 387 - DNA, 30 bp, Artificial Sequence
  Synthetic
aacgtgagcggctggcggctgttcaagaag

SEQ ID NO: 388 - protein, 10 aa, Artificial Sequence
  Synthetic
NVSGWRLFKK

SEQ ID NO: 389 - DNA, 33 bp, Artificial Sequence
  Synthetic
gtgagcggctggcggctgttcaagaagattagc

SEQ ID NO: 390 - protein, 11 aa, Artificial Sequence
  Synthetic
VSGWRLFKKIS

SEQ ID NO: 391 - DNA, 27 bp, Artificial Sequence
  Synthetic
agcggctggcggctgttcaagaagatt

SEQ ID NO: 392 - protein, 9 aa, Artificial Sequence
  Synthetic
SGWRLFKKI

SEQ ID NO: 393 - DNA, 39 bp, Artificial Sequence
  Synthetic
aacgtgagcggctggggcctgttcaagaagattagcaac

SEQ ID NO: 394 - protein, 13 aa, Artificial Sequence
  Synthetic
NVSGWGLFKKISN

SEQ ID NO: 395 - DNA, 39 bp, Artificial Sequence
  Synthetic
cccgtgagcggctggcggctgttcaagaagattagcaac

SEQ ID NO: 396 - protein, 13 aa, Artificial Sequence
  Synthetic
PVSGWRLFKKISN

SEQ ID NO: 397 - DNA, 42 bp, Artificial Sequence
  Synthetic
aaccccgtgagcggctggcggctgttcaagaagattagcaac

SEQ ID NO: 398 - protein, 14 aa, Artificial Sequence
  Synthetic
NPVSGWRLFKKISN

SEQ ID NO: 399 - DNA, 45 bp, Artificial Sequence
  Synthetic
atcaaccccgtgagcggctggcggctgttcaagaagattagcaac

SEQ ID NO: 400 - protein, 15 aa, Artificial Sequence
  Synthetic
INPVSGWRLFKKISN

SEQ ID NO: 401 - DNA, 48 bp, Artificial Sequence
  Synthetic
accatcaaccccgtgagcggctggcggctgttcaagaagattagcaac

SEQ ID NO: 402 - protein, 16 aa, Artificial Sequence
  Synthetic
TINPVSGWRLFKKISN

SEQ ID NO: 403 - DNA, 51 bp, Artificial Sequence
  Synthetic
gtgaccatcaaccccgtgagcggctggcggctgttcaagaagattagcaac

SEQ ID NO: 404 - protein, 17 aa, Artificial Sequence
  Synthetic
VTINPVSGWRLFKKISN

SEQ ID NO: 405 - DNA, 54 bp, Artificial Sequence
  Synthetic
cgggtgaccatcaaccccgtgagcggctggcggctgttcaagaagattagcaac

SEQ ID NO: 406 - protein, 18 aa, Artificial Sequence
  Synthetic
RVTINPVSGWRLFKKISN

SEQ ID NO: 407 - DNA, 27 bp, Artificial Sequence
  Synthetic
agcggctggcggctgctgaagaagatt

SEQ ID NO: 408 - protein, 9 aa, Artificial Sequence
  Synthetic
SGWRLLKKI

SEQ ID NO: 409 - DNA, 27 bp, Artificial Sequence
  Synthetic
accggctaccggctgctgaagaagatt

SEQ ID NO: 410 - protein, 9 aa, Artificial Sequence
  Synthetic
TGYRLLKKI

SEQ ID NO: 411 - DNA, 24 bp, Artificial Sequence
  Synthetic
agcggctggcggctgttcaagaag

SEQ ID NO: 412 - protein, 8 aa, Artificial Sequence
  Synthetic
SGWRLFKK

SEQ ID NO: 413 - DNA, 33 bp, Artificial Sequence
  Synthetic
gtgaccggctaccggctgttcaagaagattagc

SEQ ID NO: 414 - protein, 11 aa, Artificial Sequence
  Synthetic
VTGYRLFKKIS

SEQ ID NO: 415 - DNA, 33 bp, Artificial Sequence
  Synthetic
gtgaccggctaccggctgttcgagaagattagc

SEQ ID NO: 416 - protein, 11 aa, Artificial Sequence
  Synthetic
VTGYRLFEKIS

SEQ ID NO: 417 - DNA, 33 bp, Artificial Sequence
  Synthetic
gtgaccggctaccggctgttcgagcagattagc

SEQ ID NO: 418 - protein, 11 aa, Artificial Sequence
  Synthetic
VTGYRLFEQIS

SEQ ID NO: 419 - DNA, 33 bp, Artificial Sequence
  Synthetic
gtgaccggctaccggctgttcgagaaggagagc

SEQ ID NO: 420 - protein, 11 aa, Artificial Sequence
  Synthetic
VTGYRLFEKES

SEQ ID NO: 421 - DNA, 33 bp, Artificial Sequence
  Synthetic
gtgaccggctaccggctgttcgagcaggagagc

SEQ ID NO: 422 - protein, 11 aa, Artificial Sequence
  Synthetic
VTGYRLFEQES

SEQ ID NO: 423 - DNA, 33 bp, Artificial Sequence
  Synthetic
gtgaccggctaccggctgttcgagcaggagctg

SEQ ID NO: 424 - protein, 11 aa, Artificial Sequence
  Synthetic
VTGYRLFEQEL

SEQ ID NO: 425 - DNA, 33 bp, Artificial Sequence
  Synthetic
gtggagggctaccggctgttcgagaagattagc

SEQ ID NO: 426 - protein, 11 aa, Artificial Sequence
  Synthetic
VEGYRLFEKIS

SEQ ID NO: 427 - DNA, 33 bp, Artificial Sequence
  Synthetic
gtggagggctaccggctgttcgagcagattagc

SEQ ID NO: 428 - protein, 11 aa, Artificial Sequence
  Synthetic
VEGYRLFEQIS

SEQ ID NO: 429 - DNA, 33 bp, Artificial Sequence
  Synthetic
gtggagggctaccggctgttcgagaaggagagc

SEQ ID NO: 430 - protein, 11 aa, Artificial Sequence
  Synthetic
VEGYRLFEKES

SEQ ID NO: 431 - DNA, 33 bp, Artificial Sequence
  Synthetic
gtggagggctaccggctgttcgagcaggagagc

SEQ ID NO: 432 - protein, 11 aa, Artificial Sequence
  Synthetic
VEGYRLFEQES

SEQ ID NO: 433 - DNA, 33 bp, Artificial Sequence
  Synthetic
gtggagggctaccggctgttcgagcaggagctg

SEQ ID NO: 434 - protein, 11 aa, Artificial Sequence
  Synthetic
VEGYRLFEQEL

SEQ ID NO: 435 - DNA, 33 bp, Artificial Sequence
  Synthetic
attagcggctggcggctgatgaagaacattagc

SEQ ID NO: 436 - protein, 11 aa, Artificial Sequence
  Synthetic
ISGWRLMKNIS

SEQ ID NO: 437 - DNA, 33 bp, Artificial Sequence
  Synthetic
gtggagggctaccggctgttcaagaagattagc

SEQ ID NO: 438 - protein, 11 aa, Artificial Sequence
  Synthetic
VEGYRLFKKIS

SEQ ID NO: 439 - DNA, 477 bp, Artificial Sequence
  Synthetic
atggtcttcacactcgaagatttcgttggggactggcgacagacagccggctacaacctggaccaagtccttgaacagggaggtgtgtccagtttgtttcagaatctcggggtgtccgtaactccgatccaaaggattgtcctgagcggtgaaaatgggctgaagatcgacatccatgtcatcatcccgtatgaaggtctgagcggcgaccaaatgggccagatcgaaaaaatttttaaggtggtgtaccctgtggatgatcatcactttaaggtgatcctgcactatggcacactggtaatcgacggggttacgccgaacatgatcgactatttcggacggccgtatgaaggcatcgccgtgttcgacggcaaaaagatcactgtaacagggaccctgtggaacggcaacaaaattatcgacgagcgcctgatcaaccccgacggctccctgctgttccgagtaaccatcaacgtt

SEQ ID NO: 440 - protein, 159 aa, Artificial Sequence
  Synthetic
MVFTLEDFVGDWRQTAGYNLDQVLEQGGVSSLFQNLGVSVTPIQRIVLSGENGLKIDIHVIIPYEGLSGDQMGQIEKIFKVVYPVDDHHFKVILHYGTLVIDGVTPNMIDYFGRPYEGIAVFDGKKITVTGTLWNGNKIIDERLINPDGSLLFRVTINV

SEQ ID NO: 441 - DNA, 477 bp, Artificial Sequence
  Synthetic
atggtcttcacactcgaagatttcgttggggactggcaacagacagccggctacaacctggaccaagtccttgaacagggaggtgtgtccagtttgtttcagaatctcggggtgtccgtaactccgatccaaaggattgtcctgagcggtgaaaatgggctgaagatcgacatccatgtcatcatcccgtatgaaggtctgagcggcgaccaaatgggccagatcgaaaaaatttttaaggtggtgtaccctgtggatgatcatcactttaaggtgatcctgcactatggcacactggtaatcgacggggttacgccgaacatgatcgactatttcggacggccgtatgaaggcatcgccgtgttcgacggcaaaaagatcactgtaacagggaccctgtggaacggcaacaaaattatcgacgagcgcctgatcaaccccgacggctccctgctgttccgagtaaccatcaacgtt

SEQ ID NO: 442 - protein, 159 aa, Artificial Sequence
  Synthetic
MVFTLEDFVGDWNQTAGYNLDQVLEQGGVSSLFQNLGVSVTPIQRIVLSGENGLKIDIHVIIPYEGLSGDQMGQIEKIFKVVYPVDDHHFKVILHYGTLVIDGVTPNMIDYFGRPYEGIAVFDGKKITVTGTLWNGNKIIDERLINPDGSLLFRVTINV

SEQ ID NO: 443 - DNA, 477 bp, Artificial Sequence
  Synthetic
atggtcttcacactcgaagatttcgttggggactggcgacagatcgccggctacaacctggaccaagtccttgaacagggaggtgtgtccagtttgtttcagaatctcggggtgtccgtaactccgatccaaaggattgtcctgagcggtgaaaatgggctgaagatcgacatccatgtcatcatcccgtatgaaggtctgagcggcgaccaaatgggccagatcgaaaaaatttttaaggtggtgtaccctgtggatgatcatcactttaaggtgatcctgcactatggcacactggtaatcgacggggttacgccgaacatgatcgactatttcggacggccgtatgaaggcatcgccgtgttcgacggcaaaaagatcactgtaacagggaccctgtggaacggcaacaaaattatcgacgagcgcctgatcaaccccgacggctccctgctgttccgagtaaccatcaacgtt

SEQ ID NO: 444 - protein, 159 aa, Artificial Sequence
  Synthetic
MVFTLEDFVGDWRQIAGYNLDQVLEQGGVSSLFQNLGVSVTPIQRIVLSGENGLKIDIHVIIPYEGLSGDQMGQIEKIFKVVYPVDDHHFKVILHYGTLVIDGVTPNMIDYFGRPYEGIAVFDGKKITVTGTLWNGNKIIDERLINPDGSLLFRVTINV

SEQ ID NO: 445 - DNA, 477 bp, Artificial Sequence
  Synthetic
atggtcttcacactcgaagatttcgttggggactggcgacagacagccagctacaacctggaccaagtccttgaacagggaggtgtgtccagtttgtttcagaatctcggggtgtccgtaactccgatccaaaggattgtcctgagcggtgaaaatgggctgaagatcgacatccatgtcatcatcccgtatgaaggtctgagcggcgaccaaatgggccagatcgaaaaaatttttaaggtggtgtaccctgtggatgatcatcactttaaggtgatcctgcactatggcacactggtaatcgacggggttacgccgaacatgatcgactatttcggacggccgtatgaaggcatcgccgtgttcgacggcaaaaagatcactgtaacagggaccctgtggaacggcaacaaaattatcgacgagcgcctgatcaaccccgacggctccctgctgttccgagtaaccatcaacgtt

SEQ ID NO: 446 - protein, 159 aa, Artificial Sequence
  Synthetic
MVFTLEDFVGDWRQTASYNLDQVLEQGGVSSLFQNLGVSVTPIQRIVLSGENGLKIDIHVIIPYEGLSGDQMGQIEKIFKVVYPVDDHHFKVILHYGTLVIDGVTPNMIDYFGRPYEGIAVFDGKKITVTGTLWNGNKIIDERLINPDGSLLFRVTINV

SEQ ID NO: 447 - DNA, 477 bp, Artificial Sequence
  Synthetic
atggtcttcacactcgaagatttcgttggggactggcgacagacagccggctacaaccaggaccaagtccttgaacagggaggtgtgtccagtttgtttcagaatctcggggtgtccgtaactccgatccaaaggattgtcctgagcggtgaaaatgggctgaagatcgacatccatgtcatcatcccgtatgaaggtctgagcggcgaccaaatgggccagatcgaaaaaatttttaaggtggtgtaccctgtggatgatcatcactttaaggtgatcctgcactatggcacactggtaatcgacggggttacgccgaacatgatcgactatttcggacggccgtatgaaggcatcgccgtgttcgacggcaaaaagatcactgtaacagggaccctgtggaacggcaacaaaattatcgacgagcgcctgatcaaccccgacggctccctgctgttccgagtaaccatcaacgtt

SEQ ID NO: 448 - protein, 159 aa, Artificial Sequence
  Synthetic
MVFTLEDFVGDWRQTAGYNQDQVLEQGGVSSLFQNLGVSVTPIQRIVLSGENGLKIDIHVIIPYEGLSGDQMGQIEKIFKVVYPVDDHHFKVILHYGTLVIDGVTPNMIDYFGRPYEGIAVFDGKKITVTGTLWNGNKIIDERLINPDGSLLFRVTINV

SEQ ID NO: 449 - DNA, 477 bp, Artificial Sequence
  Synthetic
atggtcttcacactcgaagatttcgttggggactggcgacagacagccggctacaacctggacaaggtccttgaacagggaggtgtgtccagtttgtttcagaatctcggggtgtccgtaactccgatccaaaggattgtcctgagcggtgaaaatgggctgaagatcgacatccatgtcatcatcccgtatgaaggtctgagcggcgaccaaatgggccagatcgaaaaaatttttaaggtggtgtaccctgtggatgatcatcactttaaggtgatcctgcactatggcacactggtaatcgacggggttacgccgaacatgatcgactatttcggacggccgtatgaaggcatcgccgtgttcgacggcaaaaagatcactgtaacagggaccctgtggaacggcaacaaaattatcgacgagcgcctgatcaaccccgacggctccctgctgttccgagtaaccatcaacgtt

SEQ ID NO: 450 - protein, 159 aa, Artificial Sequence
  Synthetic
MVFTLEDFVGDWRQTAGYNLDKVLEQGGVSSLFQNLGVSVTPIQRIVLSGENGLKIDIHVIIPYEGLSGDQMGQIEKIFKVVYPVDDHHFKVILHYGTLVIDGVTPNMIDYFGRPYEGIAVFDGKKITVTGTLWNGNKIIDERLINPDGSLLFRVTINV

SEQ ID NO: 451 - DNA, 477 bp, Artificial Sequence
  Synthetic
atggtcttcacactcgaagatttcgttggggactggcgacagacagccggctacaacctggaccaagtccttgaacagggaggtatgtccagtttgtttcagaatctcggggtgtccgtaactccgatccaaaggattgtcctgagcggtgaaaatgggctgaagatcgacatccatgtcatcatcccgtatgaaggtctgagcggcgaccaaatgggccagatcgaaaaaatttttaaggtggtgtaccctgtggatgatcatcactttaaggtgatcctgcactatggcacactggtaatcgacggggttacgccgaacatgatcgactatttcggacggccgtatgaaggcatcgccgtgttcgacggcaaaaagatcactgtaacagggaccctgtggaacggcaacaaaattatcgacgagcgcctgatcaaccccgacggctccctgctgttccgagtaaccatcaacgtt

SEQ ID NO: 452 - protein, 159 aa, Artificial Sequence
  Synthetic
MVFTLEDFVGDWRQTAGYNLDQVLEQGGMSSLFQNLGVSVTPIQRIVLSGENGLKIDIHVIIPYEGLSGDQMGQIEKIFKVVYPVDDHHFKVILHYGTLVIDGVTPNMIDYFGRPYEGIAVFDGKKITVTGTLWNGNKIIDERLINPDGSLLFRVTINV

SEQ ID NO: 453 - DNA, 477 bp, Artificial Sequence
  Synthetic
atggtcttcacactcgaagatttcgttggggactggcgacagacagccggctacaacctggaccaagtccttgaacagggaggtgtgtccagtttgatacagaatctcggggtgtccgtaactccgatccaaaggattgtcctgagcggtgaaaatgggctgaagatcgacatccatgtcatcatcccgtatgaaggtctgagcggcgaccaaatgggccagatcgaaaaaatttttaaggtggtgtaccctgtggatgatcatcactttaaggtgatcctgcactatggcacactggtaatcgacggggttacgccgaacatgatcgactatttcggacggccgtatgaaggcatcgccgtgttcgacggcaaaaagatcactgtaacagggaccctgtggaacggcaacaaaattatcgacgagcgcctgatcaaccccgacggctccctgctgttccgagtaaccatcaacgtt

SEQ ID NO: 454 - protein, 159 aa, Artificial Sequence
  Synthetic
MVFTLEDFVGDWRQTAGYNLDQVLEQGGVSSLIQNLGVSVTPIQRIVLSGENGLKIDIHVIIPYEGLSGDQMGQIEKIFKVVYPVDDHHFKVILHYGTLVIDGVTPNMIDYFGRPYEGIAVFDGKKITVTGTLWNGNKIIDERLINPDGSLLFRVTINV

SEQ ID NO: 455 - DNA, 477 bp, Artificial Sequence
  Synthetic
atggtcttcacactcgaagatttcgttggggactggcgacagacagccggctacaacctggaccaagtccttgaacagggaggtgtgtccagtttgttgcagaatctcggggtgtccgtaactccgatccaaaggattgtcctgagcggtgaaaatgggctgaagatcgacatccatgtcatcatcccgtatgaaggtctgagcggcgaccaaatgggccagatcgaaaaaatttttaaggtggtgtaccctgtggatgatcatcactttaaggtgatcctgcactatggcacactggtaatcgacggggttacgccgaacatgatcgactatttcggacggccgtatgaaggcatcgccgtgttcgacggcaaaaagatcactgtaacagggaccctgtggaacggcaacaaaattatcgacgagcgcctgatcaaccccgacggctccctgctgttccgagtaaccatcaacgtt

SEQ ID NO: 456 - protein, 159 aa, Artificial Sequence
  Synthetic
MVFTLEDFVGDWRQTAGYNLDQVLEQGGVSSLLQNLGVSVTPIQRIVLSGENGLKIDIHVIIPYEGLSGDQMGQIEKIFKVVYPVDDHHFKVILHYGTLVIDGVTPNMIDYFGRPYEGIAVFDGKKITVTGTLWNGNKIIDERLINPDGSLLFRVTINV

SEQ ID NO: 457 - DNA, 477 bp, Artificial Sequence
  Synthetic
atggtcttcacactcgaagatttcgttggggactggcgacagacagccggctacaacctggaccaagtccttgaacagggaggtgtgtccagtttggttcagaatctcggggtgtccgtaactccgatccaaaggattgtcctgagcggtgaaaatgggctgaagatcgacatccatgtcatcatcccgtatgaaggtctgagcggcgaccaaatgggccagatcgaaaaaatttttaaggtggtgtaccctgtggatgatcatcactttaaggtgatcctgcactatggcacactggtaatcgacggggttacgccgaacatgatcgactatttcggacggccgtatgaaggcatcgccgtgttcgacggcaaaaagatcactgtaacagggaccctgtggaacggcaacaaaattatcgacgagcgcctgatcaaccccgacggctccctgctgttccgagtaaccatcaacgtt

SEQ ID NO: 458 - protein, 159 aa, Artificial Sequence
  Synthetic
MVFTLEDFVGDWRQTAGYNLDQVLEQGGVSSLVQNLGVSVTPIQRIVLSGENGLKIDIHVIIPYEGLSGDQMGQIEKIFKVVYPVDDHHFKVILHYGTLVIDGVTPNMIDYFGRPYEGIAVFDGKKITVTGTLWNGNKIIDERLINPDGSLLFRVTINV

SEQ ID NO: 459 - DNA, 477 bp, Artificial Sequence
  Synthetic
atggtcttcacactcgaagatttcgttggggactggcgacagacagccggctacaacctggaccaagtccttgaacagggaggtgtgtccagtttgtttcggaatctcggggtgtccgtaactccgatccaaaggattgtcctgagcggtgaaaatgggctgaagatcgacatccatgtcatcatcccgtatgaaggtctgagcggcgaccaaatgggccagatcgaaaaaatttttaaggtggtgtaccctgtggatgatcatcactttaaggtgatcctgcactatggcacactggtaatcgacggggttacgccgaacatgatcgactatttcggacggccgtatgaaggcatcgccgtgttcgacggcaaaaagatcactgtaacagggaccctgtggaacggcaacaaaattatcgacgagcgcctgatcaaccccgacggctccctgctgttccgagtaaccatcaacgtt

SEQ ID NO: 460 - protein, 159 aa, Artificial Sequence
  Synthetic
MVFTLEDFVGDWRQTAGYNLDQVLEQGGVSSLFRNLGVSVTPIQRIVLSGENGLKIDIHVIIPYEGLSGDQMGQIEKIFKVVYPVDDHHFKVILHYGTLVIDGVTPNMIDYFGRPYEGIAVFDGKKITVTGTLWNGNKIIDERLINPDGSLLFRVTINV

SEQ ID NO: 461 - DNA, 477 bp, Artificial Sequence
  Synthetic
atggtcttcacactcgaagatttcgttggggactggcgacagacagccggctacaacctggaccaagtccttgaacagggaggtgtgtccagtttgtttcagaaactcggggtgtccgtaactccgatccaaaggattgtcctgagcggtgaaaatgggctgaagatcgacatccatgtcatcatcccgtatgaaggtctgagcggcgaccaaatgggccagatcgaaaaaatttttaaggtggtgtaccctgtggatgatcatcactttaaggtgatcctgcactatggcacactggtaatcgacggggttacgccgaacatgatcgactatttcggacggccgtatgaaggcatcgccgtgttcgacggcaaaaagatcactgtaacagggaccctgtggaacggcaacaaaattatcgacgagcgcctgatcaaccccgacggctccctgctgttccgagtaaccatcaacgtt

SEQ ID NO: 462 - protein, 159 aa, Artificial Sequence
  Synthetic
MVFTLEDFVGDWRQTAGYNLDQVLEQGGVSSLFQKLGVSVTPIQRIVLSGENGLKIDIHVIIPYEGLSGDQMGQIEKIFKVVYPVDDHHFKVILHYGTLVIDGVTPNMIDYFGRPYEGIAVFDGKKITVTGTLWNGNKIIDERLINPDGSLLFRVTINV

SEQ ID NO: 463 - DNA, 477 bp, Artificial Sequence
  Synthetic
atggtcttcacactcgaagatttcgttggggactggcgacagacagccggctacaacctggaccaagtccttgaacagggaggtgtgtccagtttgtttcagcggctcggggtgtccgtaactccgatccaaaggattgtcctgagcggtgaaaatgggctgaagatcgacatccatgtcatcatcccgtatgaaggtctgagcggcgaccaaatgggccagatcgaaaaaatttttaaggtggtgtaccctgtggatgatcatcactttaaggtgatcctgcactatggcacactggtaatcgacggggttacgccgaacatgatcgactatttcggacggccgtatgaaggcatcgccgtgttcgacggcaaaaagatcactgtaacagggaccctgtggaacggcaacaaaattatcgacgagcgcctgatcaaccccgacggctccctgctgttccgagtaaccatcaacgtt

SEQ ID NO: 464 - protein, 159 aa, Artificial Sequence
  Synthetic
MVFTLEDFVGDWRQTAGYNLDQVLEQGGVSSLFQRLGVSVTPIQRIVLSGENGLKIDIHVIIPYEGLSGDQMGQIEKIFKVVYPVDDHHFKVILHYGTLVIDGVTPNMIDYFGRPYEGIAVFDGKKITVTGTLWNGNKIIDERLINPDGSLLFRVTINV

SEQ ID NO: 465 - DNA, 477 bp, Artificial Sequence
  Synthetic
atggtcttcacactcgaagatttcgttggggactggcgacagacagccggctacaacctggaccaagtccttgaacagggaggtgtgtccagtttgtttcagaatctcggggtgtccgtaactccgatccaaaggattgtcctgagcggtgaaaatgggctgaagatcgacaaccatgtcatcatcccgtatgaaggtctgagcggcgaccaaatgggccagatcgaaaaaatttttaaggtggtgtaccctgtggatgatcatcactttaaggtgatcctgcactatggcacactggtaatcgacggggttacgccgaacatgatcgactatttcggacggccgtatgaaggcatcgccgtgttcgacggcaaaaagatcactgtaacagggaccctgtggaacggcaacaaaattatcgacgagcgcctgatcaaccccgacggctccctgctgttccgagtaaccatcaacgtt

SEQ ID NO: 466 - protein, 159 aa, Artificial Sequence
  Synthetic
MVFTLEDFVGDWRQTAGYNLDQVLEQGGVSSLFQNLGVSVTPIQRIVLSGENGLKIDNHVIIPYEGLSGDQMGQIEKIFKVVYPVDDHHFKVILHYGTLVIDGVTPNMIDYFGRPYEGIAVFDGKKITVTGTLWNGNKIIDERLINPDGSLLFRVTINV

SEQ ID NO: 467 - DNA, 477 bp, Artificial Sequence
  Synthetic
atggtcttcacactcgaagatttcgttggggactggcgacagacagccggctacaacctggaccaagtccttgaacagggaggtgtgtccagtttgtttcagaatctcggggtgtccgtaactccgatccaaaggattgtcctgagcggtgaaaatgggctgaagatcgacatccatgccatcatcccgtatgaaggtctgagcggcgaccaaatgggccagatcgaaaaaatttttaaggtggtgtaccctgtggatgatcatcactttaaggtgatcctgcactatggcacactggtaatcgacggggttacgccgaacatgatcgactatttcggacggccgtatgaaggcatcgccgtgttcgacggcaaaaagatcactgtaacagggaccctgtggaacggcaacaaaattatcgacgagcgcctgatcaaccccgacggctccctgctgttccgagtaaccatcaacgtt

SEQ ID NO: 468 - protein, 159 aa, Artificial Sequence
  Synthetic
MVFTLEDFVGDWRQTAGYNLDQVLEQGGVSSLFQNLGVSVTPIQRIVLSGENGLKIDIHAIIPYEGLSGDQMGQIEKIFKVVYPVDDHHFKVILHYGTLVIDGVTPNMIDYFGRPYEGIAVFDGKKITVTGTLWNGNKIIDERLINPDGSLLFRVTINV

SEQ ID NO: 469 - DNA, 477 bp, Artificial Sequence
  Synthetic
atggtcttcacactcgaagatttcgttggggactggcgacagacagccggctacaacctggaccaagtccttgaacagggaggtgtgtccagtttgtttcagaatctcggggtgtccgtaactccgatccaaaggattgtcctgagcggtgaaaatgggctgaagatcgacatccatgtcaccatcccgtatgaaggtctgagcggcgaccaaatgggccagatcgaaaaaatttttaaggtggtgtaccctgtggatgatcatcactttaaggtgatcctgcactatggcacactggtaatcgacggggttacgccgaacatgatcgactatttcggacggccgtatgaaggcatcgccgtgttcgacggcaaaaagatcactgtaacagggaccctgtggaacggcaacaaaattatcgacgagcgcctgatcaaccccgacggctccctgctgttccgagtaaccatcaacgtt

SEQ ID NO: 470 - protein, 159 aa, Artificial Sequence
  Synthetic
MVFTLEDFVGDWRQTAGYNLDQVLEQGGVSSLFQNLGVSVTPIQRIVLSGENGLKIDIHVTIPYEGLSGDQMGQIEKIFKVVYPVDDHHFKVILHYGTLVIDGVTPNMIDYFGRPYEGIAVFDGKKITVTGTLWNGNKIIDERLINPDGSLLFRVTINV

SEQ ID NO: 471 - DNA, 477 bp, Artificial Sequence
  Synthetic
atggtcttcacactcgaagatttcgttggggactggcgacagacagccggctacaacctggaccaagtccttgaacagggaggtgtgtccagtttgtttcagaatctcggggtgtccgtaactccgatccaaaggattgtcctgagcggtgaaaatgggctgaagatcgacatccatgtcatcatcccgtatgaaggtctgagcagcgaccaaatgggccagatcgaaaaaatttttaaggtggtgtaccctgtggatgatcatcactttaaggtgatcctgcactatggcacactggtaatcgacggggttacgccgaacatgatcgactatttcggacggccgtatgaaggcatcgccgtgttcgacggcaaaaagatcactgtaacagggaccctgtggaacggcaacaaaattatcgacgagcgcctgatcaaccccgacggctccctgctgttccgagtaaccatcaacgtt

SEQ ID NO: 472 - protein, 159 aa, Artificial Sequence
  Synthetic
MVFTLEDFVGDWRQTAGYNLDQVLEQGGVSSLFQNLGVSVTPIQRIVLSGENGLKIDIHVIIPYEGLSSDQMGQIEKIFKVVYPVDDHHFKVILHYGTLVIDGVTPNMIDYFGRPYEGIAVFDGKKITVTGTLWNGNKIIDERLINPDGSLLFRVTINV

SEQ ID NO: 473 - DNA, 477 bp, Artificial Sequence
  Synthetic
atggtcttcacactcgaagatttcgttggggactggcgacagacagccggctacaacctggaccaagtccttgaacagggaggtgtgtccagtttgtttcagaatctcggggtgtccgtaactccgatccaaaggattgtcctgagcggtgaaaatgggctgaagatcgacatccatgtcatcatcccgtatgaaggtctgagcgacgaccaaatgggccagatcgaaaaaatttttaaggtggtgtaccctgtggatgatcatcactttaaggtgatcctgcactatggcacactggtaatcgacggggttacgccgaacatgatcgactatttcggacggccgtatgaaggcatcgccgtgttcgacggcaaaaagatcactgtaacagggaccctgtggaacggcaacaaaattatcgacgagcgcctgatcaaccccgacggctccctgctgttccgagtaaccatcaacgtt

SEQ ID NO: 474 - protein, 159 aa, Artificial Sequence
  Synthetic
MVFTLEDFVGDWRQTAGYNLDQVLEQGGVSSLFQNLGVSVTPIQRIVLSGENGLKIDIHVIIPYEGLSDDQMGQIEKIFKVVYPVDDHHFKVILHYGTLVIDGVTPNMIDYFGRPYEGIAVFDGKKITVTGTLWNGNKIIDERLINPDGSLLFRVTINV

SEQ ID NO: 475 - DNA, 477 bp, Artificial Sequence
  Synthetic
atggtcttcacactcgaagatttcgttggggactggcgacagacagccggctacaacctggaccaagtccttgaacagggaggtgtgtccagtttgtttcagaatctcggggtgtccgtaactccgatccaaaggattgtcctgagcggtgaaaatgggctgaagatcgacatccatgtcatcatcccgtatgaaggtctgagcggcgaccaaatgggccagatcgaagagatttttaaggtggtgtaccctgtggatgatcatcactttaaggtgatcctgcactatggcacactggtaatcgacggggttacgccgaacatgatcgactatttcggacggccgtatgaaggcatcgccgtgttcgacggcaaaaagatcactgtaacagggaccctgtggaacggcaacaaaattatcgacgagcgcctgatcaaccccgacggctccctgctgttccgagtaaccatcaacgtt

SEQ ID NO: 476 - protein, 159 aa, Artificial Sequence
  Synthetic
MVFTLEDFVGDWRQTAGYNLDQVLEQGGVSSLFQNLGVSVTPIQRIVLSGENGLKIDIHVIIPYEGLSGDQMGQIEEIFKVVYPVDDHHFKVILHYGTLVIDGVTPNMIDYFGRPYEGIAVFDGKKITVTGTLWNGNKIIDERLINPDGSLLFRVTINV

SEQ ID NO: 477 - DNA, 477 bp, Artificial Sequence
  Synthetic
atggtcttcacactcgaagatttcgttggggactggcgacagacagccggctacaacctggaccaagtccttgaacagggaggtgtgtccagtttgtttcagaatctcggggtgtccgtaactccgatccaaaggattgtcctgagcggtgaaaatgggctgaagatcgacatccatgtcatcatcccgtatgaaggtctgagcggcgaccaaatgggccagatcgaaaaaatttttaaggtggtgtaccctgtggatgatcatcactttaaggtgatcctgcactatggcacactggtaatcgacggggttacgccgaacgtgatcgactatttcggacggccgtatgaaggcatcgccgtgttcgacggcaaaaagatcactgtaacagggaccctgtggaacggcaacaaaattatcgacgagcgcctgatcaaccccgacggctccctgctgttccgagtaaccatcaacgtt

SEQ ID NO: 478 - protein, 159 aa, Artificial Sequence
  Synthetic
MVFTLEDFVGDWRQTAGYNLDQVLEQGGVSSLFQNLGVSVTPIQRIVLSGENGLKIDIHVIIPYEGLSGDQMGQIEKIFKVVYPVDDHHFKVILHYGTLVIDGVTPNVIDYFGRPYEGIAVFDGKKITVTGTLWNGNKIIDERLINPDGSLLFRVTINV

SEQ ID NO: 479 - DNA, 477 bp, Artificial Sequence
  Synthetic
atggtcttcacactcgaagatttcgttggggactggcgacagacagccggctacaacctggaccaagtccttgaacagggaggtgtgtccagtttgtttcagaatctcggggtgtccgtaactccgatccaaaggattgtcctgagcggtgaaaatgggctgaagatcgacatccatgtcatcatcccgtatgaaggtctgagcggcgaccaaatgggccagatcgaaaaaatttttaaggtggtgtaccctgtggatgatcatcactttaaggtgatcctgcactatggcacactggtaatcgacggggttacgccgaacattatcgactatttcggacggccgtatgaaggcatcgccgtgttcgacggcaaaaagatcactgtaacagggaccctgtggaacggcaacaaaattatcgacgagcgcctgatcaaccccgacggctccctgctgttccgagtaaccatcaacgtt

SEQ ID NO: 480 - protein, 159 aa, Artificial Sequence
  Synthetic
MVFTLEDFVGDWRQTAGYNLDQVLEQGGVSSLFQNLGVSVTPIQRIVLSGENGLKIDIHVIIPYEGLSGDQMGQIEKIFKVVYPVDDHHFKVILHYGTLVIDGVTPNIIDYFGRPYEGIAVFDGKKITVTGTLWNGNKIIDERLINPDGSLLFRVTINV

SEQ ID NO: 481 - DNA, 477 bp, Artificial Sequence
  Synthetic
atggtcttcacactcgaagatttcgttggggactggcgacagacagccggctacaacctggaccaagtccttgaacagggaggtgtgtccagtttgtttcagaatctcggggtgtccgtaactccgatccaaaggattgtcctgagcggtgaaaatgggctgaagatcgacatccatgtcatcatcccgtatgaaggtctgagcggcgaccaaatgggccagatcgaaaaaatttttaaggtggtgtaccctgtggatgatcatcactttaaggtgatcctgcactatggcacactggtaatcgacggggttacgccgaacatgatcaactatttcggacggccgtatgaaggcatcgccgtgttcgacggcaaaaagatcactgtaacagggaccctgtggaacggcaacaaaattatcgacgagcgcctgatcaaccccgacggctccctgctgttccgagtaaccatcaacgtt

SEQ ID NO: 482 - protein, 159 aa, Artificial Sequence
  Synthetic
MVFTLEDFVGDWRQTAGYNLDQVLEQGGVSSLFQNLGVSVTPIQRIVLSGENGLKIDIHVIIPYEGLSGDQMGQIEKIFKVVYPVDDHHFKVILHYGTLVIDGVTPNMINYFGRPYEGIAVFDGKKITVTGTLWNGNKIIDERLINPDGSLLFRVTINV

SEQ ID NO: 483 - DNA, 477 bp, Artificial Sequence
  Synthetic
atggtcttcacactcgaagatttcgttggggactggcgacagacagccggctacaacctggaccaagtccttgaacagggaggtgtgtccagtttgtttcagaatctcggggtgtccgtaactccgatccaaaggattgtcctgagcggtgaaaatgggctgaagatcgacatccatgtcatcatcccgtatgaaggtctgagcggcgaccaaatgggccagatcgaaaaaatttttaaggtggtgtaccctgtggatgatcatcactttaaggtgatcctgcactatggcacactggtaatcgacggggttacgccgaacatgatcgactatttcggacagccgtatgaaggcatcgccgtgttcgacggcaaaaagatcactgtaacagggaccctgtggaacggcaacaaaattatcgacgagcgcctgatcaaccccgacggctccctgctgttccgagtaaccatcaacgtt

SEQ ID NO: 484 - protein, 159 aa, Artificial Sequence
  Synthetic
MVFTLEDFVGDWRQTAGYNLDQVLEQGGVSSLFQNLGVSVTPIQRIVLSGENGLKIDIHVIIPYEGLSGDQMGQIEKIFKVVYPVDDHHFKVILHYGTLVIDGVTPNMIDYFGQPYEGIAVFDGKKITVTGTLWNGNKIIDERLINPDGSLLFRVTINV

SEQ ID NO: 485 - DNA, 477 bp, Artificial Sequence
  Synthetic
atggtcttcacactcgaagatttcgttggggactggcgacagacagccggctacaacctggaccaagtccttgaacagggaggtgtgtccagtttgtttcagaatctcggggtgtccgtaactccgatccaaaggattgtcctgagcggtgaaaatgggctgaagatcgacatccatgtcatcatcccgtatgaaggtctgagcggcgaccaaatgggccagatcgaaaaaatttttaaggtggtgtaccctgtggatgatcatcactttaaggtgatcctgcactatggcacactggtaatcgacggggttacgccgaacatgatcgactatttcggacggccgtatgaaggcatcgccgtgttcgacggcaaaaagatcactgtaacagggaccctgtggaacggcaacaaaattatcgacgagcgcctgatcacccccgacggctccctgctgttccgagtaaccatcaacgtt

SEQ ID NO: 486 - protein, 159 aa, Artificial Sequence
  Synthetic
MVFTLEDFVGDWRQTAGYNLDQVLEQGGVSSLFQNLGVSVTPIQRIVLSGENGLKIDIHVIIPYEGLSGDQMGQIEKIFKVVYPVDDHHFKVILHYGTLVIDGVTPNMIDYFGRPYEGIAVFDGKKITVTGTLWNGNKIIDERLITPDGSLLFRVTINV

SEQ ID NO: 487 - DNA, 477 bp, Artificial Sequence
  Synthetic
atggtcttcacactcgaagatttcgttggggactggcgacagacagccggctacaacctggaccaagtccttgaacagggaggtgtgtccagtttgtttcagaatctcggggtgtccgtaactccgatccaaaggattgtcctgagcggtgaaaatgggctgaagatcgacatccatgtcatcatcccgtatgaaggtctgagcggcgaccaaatgggccagatcgaaaaaatttttaaggtggtgtaccctgtggatgatcatcactttaaggtgatcctgcactatggcacactggtaatcgacggggttacgccgaacatgatcgactatttcggacggccgtatgaaggcatcgccgtgttcgacggcaaaaagatcactgtaacagggaccctgtggaacggcaacaaaattatcgacgagcgcctgatcaaccccgacggctccatgctgttccgagtaaccatcaacgtt

SEQ ID NO: 488 - protein, 159 aa, Artificial Sequence
  Synthetic
MVFTLEDFVGDWRQTAGYNLDQVLEQGGVSSLFQNLGVSVTPIQRIVLSGENGLKIDIHVIIPYEGLSGDQMGQIEKIFKVVYPVDDHHFKVILHYGTLVIDGVTPNMIDYFGRPYEGIAVFDGKKITVTGTLWNGNKIIDERLINPDGSMLFRVTINV

SEQ ID NO: 489 - DNA, 477 bp, Artificial Sequence
  Synthetic
atggtcttcacactcgaagatttcgttggggactggcgacagacagccggctacaacctggaccaagtccttgaacagggaggtgtgtccagtttgtttcagaatctcggggtgtccgtaactccgatccaaaggattgtcctgagcggtgaaaatgggctgaagatcgacatccatgtcatcatcccgtatgaaggtctgagcggcgaccaaatgggccagatcgaaaaaatttttaaggtggtgtaccctgtggatgatcatcactttaaggtgatcctgcactatggcacactggtaatcgacggggttacgccgaacatgatcgactatttcggacggccgtatgaaggcatcgccgtgttcgacggcaaaaagatcactgtaacagggaccctgtggaacggcaacaaaattatcgacgagcgcctgatcaaccccgacggctccctgctgttccgagtaaccatcgacgtt

SEQ ID NO: 490 - protein, 159 aa, Artificial Sequence
  Synthetic
MVFTLEDFVGDWRQTAGYNLDQVLEQGGVSSLFQNLGVSVTPIQRIVLSGENGLKIDIHVIIPYEGLSGDQMGQIEKIFKVVYPVDDHHFKVILHYGTLVIDGVTPNMIDYFGRPYEGIAVFDGKKITVTGTLWNGNKIIDERLINPDGSLLFRVTIDV

SEQ ID NO: 491 - DNA, 477 bp, Artificial Sequence
  Synthetic
atggtcttcacactcgaagatttcgttggggactggcgacagacagccggctacaacctggaccaagtccttgaacagggaggtgtgtccagtttgtttcagaatctcggggtgtccgtaactccgatccaaaggattgtcctgagcggtgaaaatgggctgaagatcgacatccatgtcatcatcccgtatgaaggtctgagcggcgaccaaatgggccagatcgaaaaaatttttaaggtggtgtaccctgtggatgatcatcactttaaggtgatcctgcactatggcacactggtaatcgacggggttacgccgaacatgatcgactatttcggacggccgtatgaaggcatcgccgtgttcgacggcaaaaagatcactgtaacagggaccctgtggaacggcaacaaaattatcgacgagcgcctgatcaaccccgacggctccctgctgttccgagtaaccatcagcgtt

SEQ ID NO: 492 - protein, 159 aa, Artificial Sequence
  Synthetic
MVFTLEDFVGDWRQTAGYNLDQVLEQGGVSSLFQNLGVSVTPIQRIVLSGENGLKIDIHVIIPYEGLSGDQMGQIEKIFKVVYPVDDHHFKVILHYGTLVIDGVTPNMIDYFGRPYEGIAVFDGKKITVTGTLWNGNKIIDERLINPDGSLLFRVTISV

SEQ ID NO: 493 - DNA, 477 bp, Artificial Sequence
  Synthetic
atggtcttcacactcgaagatttcgttggggactggcgacagacagccggctacaacctggaccaagtccttgaacagggaggtgtgtccagtttgtttcagaatctcggggtgtccgtaactccgatccaaaggattgtcctgagcggtgaaaatgggctgaagatcgacatccatgtcatcatcccgtatgaaggtctgagcggcgaccaaatgggccagatcgaaaaaatttttaaggtggtgtaccctgtggatgatcatcactttaaggtgatcctgcactatggcacactggtaatcgacggggttacgccgaacatgatcgactatttcggacggccgtatgaaggcatcgccgtgttcgacggcaaaaagatcactgtaacagggaccctgtggaacggcaacaaaattatcgacgagcgcctgatcaaccccgacggctccctgctgttccgagtaaccatcaacgat

SEQ ID NO: 494 - protein, 159 aa, Artificial Sequence
  Synthetic
MVFTLEDFVGDWRQTAGYNLDQVLEQGGVSSLFQNLGVSVTPIQRIVLSGENGLKIDIHVIIPYEGLSGDQMGQIEKIFKVVYPVDDHHFKVILHYGTLVIDGVTPNMIDYFGRPYEGIAVFDGKKITVTGTLWNGNKIIDERLINPDGSLLFRVTIND

SEQ ID NO: 495 - DNA, 477 bp, Artificial Sequence
  Synthetic
atggtcttcacactcgaagatttcgttggggactggcgacagacagccggctacaacctggaccaagtccttgaacagggaggtgtgtccagtttgtttcagaatctcggggtgtccgtaactccgatccaaaggattgtcctgagcggtgaaaatgggctgaagatcgacatccatgtcatcatcccgtatgaaggtctgagcggcgaccaaatgggccagatcgaaaaaatttttaaggtggtgtaccctgtggatgatcatcactttaaggtgatcctgcactatggcacactggtaatcgacggggttacgccgaacatgatcgactatttcggacggccgtatgaaggcatcgccgtgttcgacggcaaaaagatcactgtaacagggaccctgtggaacggcaacaaaattatcgacgagcgcctgatcaaccccgacggctccctgctgttccgagtaaccatcaacagc

SEQ ID NO: 496 - protein, 159 aa, Artificial Sequence
  Synthetic
MVFTLEDFVGDWRQTAGYNLDQVLEQGGVSSLFQNLGVSVTPIQRIVLSGENGLKIDIHVIIPYEGLSGDQMGQIEKIFKVVYPVDDHHFKVILHYGTLVIDGVTPNMIDYFGRPYEGIAVFDGKKITVTGTLWNGNKIIDERLINPDGSLLFRVTINS

SEQ ID NO: 497 - DNA, 477 bp, Artificial Sequence
  Synthetic
atggtcttcacactcgaagatttcgttgccgactggcgacagacagccggctacaacctggaccaagtccttgaacagggaggtgtgtccagtttgtttcagaatctcggggtgtccgtaactccgatccaaaggattgtcctgagcggtgaaaatgggctgaagatcgacatccatgtcatcatcccgtatgaaggtctgagcggcgaccaaatgggccagatcgaaaaaatttttaaggtggtgtaccctgtggatgatcatcactttaaggtgatcctgcactatggcacactggtaatcgacggggttacgccgaacatgatcgactatttcggacggccgtatgaaggcatcgccgtgttcgacggcaaaaagatcactgtaacagggaccctgtggaacggcaacaaaattatcgacgagcgcctgatcaaccccgacggctccctgctgttccgagtaaccatcaacgtt

SEQ ID NO: 498 - protein, 159 aa, Artificial Sequence
  Synthetic
MVFTLEDFVADWRQTAGYNLDQVLEQGGVSSLFQNLGVSVTPIQRIVLSGENGLKIDIHVIIPYEGLSGDQMGQIEKIFKVVYPVDDHHFKVILHYGTLVIDGVTPNMIDYFGRPYEGIAVFDGKKITVTGTLWNGNKIIDERLINPDGSLLFRVTINV

SEQ ID NO: 499 - DNA, 477 bp, Artificial Sequence
  Synthetic
atggtcttcacactcgaagatttcgttggggactggcgacagacagccgcctacaacctggaccaagtccttgaacagggaggtgtgtccagtttgtttcagaatctcggggtgtccgtaactccgatccaaaggattgtcctgagcggtgaaaatgggctgaagatcgacatccatgtcatcatcccgtatgaaggtctgagcggcgaccaaatgggccagatcgaaaaaatttttaaggtggtgtaccctgtggatgatcatcactttaaggtgatcctgcactatggcacactggtaatcgacggggttacgccgaacatgatcgactatttcggacggccgtatgaaggcatcgccgtgttcgacggcaaaaagatcactgtaacagggaccctgtggaacggcaacaaaattatcgacgagcgcctgatcaaccccgacggctccctgctgttccgagtaaccatcaacgtt

SEQ ID NO: 500 - protein, 159 aa, Artificial Sequence
  Synthetic
MVFTLEDFVGDWRQTAAYNLDQVLEQGGVSSLFQNLGVSVTPIQRIVLSGENGLKIDIHVIIPYEGLSGDQMGQIEKIFKVVYPVDDHHFKVILHYGTLVIDGVTPNMIDYFGRPYEGIAVFDGKKITVTGTLWNGNKIIDERLINPDGSLLFRVTINV

SEQ ID NO: 501 - DNA, 477 bp, Artificial Sequence
  Synthetic
atggtcttcacactcgaagatttcgttggggactggcgacagacagccggctacaacctggaccaagtccttgaacaggccggtgtgtccagtttgtttcagaatctcggggtgtccgtaactccgatccaaaggattgtcctgagcggtgaaaatgggctgaagatcgacatccatgtcatcatcccgtatgaaggtctgagcggcgaccaaatgggccagatcgaaaaaatttttaaggtggtgtaccctgtggatgatcatcactttaaggtgatcctgcactatggcacactggtaatcgacggggttacgccgaacatgatcgactatttcggacggccgtatgaaggcatcgccgtgttcgacggcaaaaagatcactgtaacagggaccctgtggaacggcaacaaaattatcgacgagcgcctgatcaaccccgacggctccctgctgttccgagtaaccatcaacgtt

SEQ ID NO: 502 - protein, 159 aa, Artificial Sequence
  Synthetic
MVFTLEDFVGDWRQTAGYNLDQVLEQAGVSSLFQNLGVSVTPIQRIVLSGENGLKIDIHVIIPYEGLSGDQMGQIEKIFKVVYPVDDHHFKVILHYGTLVIDGVTPNMIDYFGRPYEGIAVFDGKKITVTGTLWNGNKIIDERLINPDGSLLFRVTINV

SEQ ID NO: 503 - DNA, 477 bp, Artificial Sequence
  Synthetic
atggtcttcacactcgaagatttcgttggggactggcgacagacagccggctacaacctggaccaagtccttgaacagggagccgtgtccagtttgtttcagaatctcggggtgtccgtaactccgatccaaaggattgtcctgagcggtgaaaatgggctgaagatcgacatccatgtcatcatcccgtatgaaggtctgagcggcgaccaaatgggccagatcgaaaaaatttttaaggtggtgtaccctgtggatgatcatcactttaaggtgatcctgcactatggcacactggtaatcgacggggttacgccgaacatgatcgactatttcggacggccgtatgaaggcatcgccgtgttcgacggcaaaaagatcactgtaacagggaccctgtggaacggcaacaaaattatcgacgagcgcctgatcaaccccgacggctccctgctgttccgagtaaccatcaacgtt

SEQ ID NO: 504 - protein, 159 aa, Artificial Sequence
  Synthetic
MVFTLEDFVGDWRQTAGYNLDQVLEQGAVSSLFQNLGVSVTPIQRIVLSGENGLKIDIHVIIPYEGLSGDQMGQIEKIFKVVYPVDDHHFKVILHYGTLVIDGVTPNMIDYFGRPYEGIAVFDGKKITVTGTLWNGNKIIDERLINPDGSLLFRVTINV

SEQ ID NO: 505 - DNA, 477 bp, Artificial Sequence
  Synthetic
atggtcttcacactcgaagatttcgttggggactggcgacagacagccggctacaacctggaccaagtccttgaacagggaggtgtgtccagtttgtttcagaatctcgccgtgtccgtaactccgatccaaaggattgtcctgagcggtgaaaatgggctgaagatcgacatccatgtcatcatcccgtatgaaggtctgagcggcgaccaaatgggccagatcgaaaaaatttttaaggtggtgtaccctgtggatgatcatcactttaaggtgatcctgcactatggcacactggtaatcgacggggttacgccgaacatgatcgactatttcggacggccgtatgaaggcatcgccgtgttcgacggcaaaaagatcactgtaacagggaccctgtggaacggcaacaaaattatcgacgagcgcctgatcaaccccgacggctccctgctgttccgagtaaccatcaacgtt

SEQ ID NO: 506 - protein, 159 aa, Artificial Sequence
  Synthetic
MVFTLEDFVGDWRQTAGYNLDQVLEQGGVSSLFQNLAVSVTPIQRIVLSGENGLKIDIHVIIPYEGLSGDQMGQIEKIFKVVYPVDDHHFKVILHYGTLVIDGVTPNMIDYFGRPYEGIAVFDGKKITVTGTLWNGNKIIDERLINPDGSLLFRVTINV

SEQ ID NO: 507 - DNA, 477 bp, Artificial Sequence
  Synthetic
atggtcttcacactcgaagatttcgttggggactggcgacagacagccggctacaacctggaccaagtccttgaacagggaggtgtgtccagtttgtttcagaatctcggggtgtccgtaactccgatccaaaggattgtcctgagcgccgaaaatgggctgaagatcgacatccatgtcatcatcccgtatgaaggtctgagcggcgaccaaatgggccagatcgaaaaaatttttaaggtggtgtaccctgtggatgatcatcactttaaggtgatcctgcactatggcacactggtaatcgacggggttacgccgaacatgatcgactatttcggacggccgtatgaaggcatcgccgtgttcgacggcaaaaagatcactgtaacagggaccctgtggaacggcaacaaaattatcgacgagcgcctgatcaaccccgacggctccctgctgttccgagtaaccatcaacgtt

SEQ ID NO: 508 - protein, 159 aa, Artificial Sequence
  Synthetic
MVFTLEDFVGDWRQTAGYNLDQVLEQGGVSSLFQNLGVSVTPIQRIVLSAENGLKIDIHVIIPYEGLSGDQMGQIEKIFKVVYPVDDHHFKVILHYGTLVIDGVTPNMIDYFGRPYEGIAVFDGKKITVTGTLWNGNKIIDERLINPDGSLLFRVTINV

SEQ ID NO: 509 - DNA, 477 bp, Artificial Sequence
  Synthetic
atggtcttcacactcgaagatttcgttggggactggcgacagacagccggctacaacctggaccaagtccttgaacagggaggtgtgtccagtttgtttcagaatctcggggtgtccgtaactccgatccaaaggattgtcctgagcggtgaaaatgccctgaagatcgacatccatgtcatcatcccgtatgaaggtctgagcggcgaccaaatgggccagatcgaaaaaatttttaaggtggtgtaccctgtggatgatcatcactttaaggtgatcctgcactatggcacactggtaatcgacggggttacgccgaacatgatcgactatttcggacggccgtatgaaggcatcgccgtgttcgacggcaaaaagatcactgtaacagggaccctgtggaacggcaacaaaattatcgacgagcgcctgatcaaccccgacggctccctgctgttccgagtaaccatcaacgtt

SEQ ID NO: 510 - protein, 159 aa, Artificial Sequence
  Synthetic
MVFTLEDFVGDWRQTAGYNLDQVLEQGGVSSLFQNLGVSVTPIQRIVLSGENALKIDIHVIIPYEGLSGDQMGQIEKIFKVVYPVDDHHFKVILHYGTLVIDGVTPNMIDYFGRPYEGIAVFDGKKITVTGTLWNGNKIIDERLINPDGSLLFRVTINV

SEQ ID NO: 511 - DNA, 477 bp, Artificial Sequence
  Synthetic
atggtcttcacactcgaagatttcgttggggactggcgacagacagccggctacaacctggaccaagtccttgaacagggaggtgtgtccagtttgtttcagaatctcggggtgtccgtaactccgatccaaaggattgtcctgagcggtgaaaatgggctgaagatcgacatccatgtcatcatcccgtatgaagccctgagcggcgaccaaatgggccagatcgaaaaaatttttaaggtggtgtaccctgtggatgatcatcactttaaggtgatcctgcactatggcacactggtaatcgacggggttacgccgaacatgatcgactatttcggacggccgtatgaaggcatcgccgtgttcgacggcaaaaagatcactgtaacagggaccctgtggaacggcaacaaaattatcgacgagcgcctgatcaaccccgacggctccctgctgttccgagtaaccatcaacgtt

SEQ ID NO: 512 - protein, 159 aa, Artificial Sequence
  Synthetic
MVFTLEDFVGDWRQTAGYNLDQVLEQGGVSSLFQNLGVSVTPIQRIVLSGENGLKIDIHVIIPYEALSGDQMGQIEKIFKVVYPVDDHHFKVILHYGTLVIDGVTPNMIDYFGRPYEGIAVFDGKKITVTGTLWNGNKIIDERLINPDGSLLFRVTINV

SEQ ID NO: 513 - DNA, 477 bp, Artificial Sequence
  Synthetic
atggtcttcacactcgaagatttcgttggggactggcgacagacagccggctacaacctggaccaagtccttgaacagggaggtgtgtccagtttgtttcagaatctcggggtgtccgtaactccgatccaaaggattgtcctgagcggtgaaaatgggctgaagatcgacatccatgtcatcatcccgtatgaaggtctgagcgccgaccaaatgggccagatcgaaaaaatttttaaggtggtgtaccctgtggatgatcatcactttaaggtgatcctgcactatggcacactggtaatcgacggggttacgccgaacatgatcgactatttcggacggccgtatgaaggcatcgccgtgttcgacggcaaaaagatcactgtaacagggaccctgtggaacggcaacaaaattatcgacgagcgcctgatcaaccccgacggctccctgctgttccgagtaaccatcaacgtt

SEQ ID NO: 514 - protein, 159 aa, Artificial Sequence
  Synthetic
MVFTLEDFVGDWRQTAGYNLDQVLEQGGVSSLFQNLGVSVTPIQRIVLSGENGLKIDIHVIIPYEGLSADQMGQIEKIFKVVYPVDDHHFKVILHYGTLVIDGVTPNMIDYFGRPYEGIAVFDGKKITVTGTLWNGNKIIDERLINPDGSLLFRVTINV

SEQ ID NO: 515 - DNA, 477 bp, Artificial Sequence
  Synthetic
atggtcttcacactcgaagatttcgttggggactggcgacagacagccggctacaacctggaccaagtccttgaacagggaggtgtgtccagtttgtttcagaatctcggggtgtccgtaactccgatccaaaggattgtcctgagcggtgaaaatgggctgaagatcgacatccatgtcatcatcccgtatgaaggtctgagcggcgaccaaatggcccagatcgaaaaaatttttaaggtggtgtaccctgtggatgatcatcactttaaggtgatcctgcactatggcacactggtaatcgacggggttacgccgaacatgatcgactatttcggacggccgtatgaaggcatcgccgtgttcgacggcaaaaagatcactgtaacagggaccctgtggaacggcaacaaaattatcgacgagcgcctgatcaaccccgacggctccctgctgttccgagtaaccatcaacgtt

SEQ ID NO: 516 - protein, 159 aa, Artificial Sequence
  Synthetic
MVFTLEDFVGDWRQTAGYNLDQVLEQGGVSSLFQNLGVSVTPIQRIVLSGENGLKIDIHVIIPYEGLSGDQMAQIEKIFKVVYPVDDHHFKVILHYGTLVIDGVTPNMIDYFGRPYEGIAVFDGKKITVTGTLWNGNKIIDERLINPDGSLLFRVTINV

SEQ ID NO: 517 - DNA, 477 bp, Artificial Sequence
  Synthetic
atggtcttcacactcgaagatttcgttggggactggcgacagacagccggctacaacctggaccaagtccttgaacagggaggtgtgtccagtttgtttcagaatctcggggtgtccgtaactccgatccaaaggattgtcctgagcggtgaaaatgggctgaagatcgacatccatgtcatcatcccgtatgaaggtctgagcggcgaccaaatgggccagatcgaaaaaatttttaaggtggtgtaccctgtggatgatcatcactttaaggtgatcctgcactatgccacactggtaatcgacggggttacgccgaacatgatcgactatttcggacggccgtatgaaggcatcgccgtgttcgacggcaaaaagatcactgtaacagggaccctgtggaacggcaacaaaattatcgacgagcgcctgatcaaccccgacggctccctgctgttccgagtaaccatcaacgtt

SEQ ID NO: 518 - protein, 159 aa, Artificial Sequence
  Synthetic
MVFTLEDFVGDWRQTAGYNLDQVLEQGGVSSLFQNLGVSVTPIQRIVLSGENGLKIDIHVIIPYEGLSGDQMGQIEKIFKVVYPVDDHHFKVILHYATLVIDGVTPNMIDYFGRPYEGIAVFDGKKITVTGTLWNGNKIIDERLINPDGSLLFRVTINV

SEQ ID NO: 519 - DNA, 477 bp, Artificial Sequence
  Synthetic
atggtcttcacactcgaagatttcgttggggactggcgacagacagccggctacaacctggaccaagtccttgaacagggaggtgtgtccagtttgtttcagaatctcggggtgtccgtaactccgatccaaaggattgtcctgagcggtgaaaatgggctgaagatcgacatccatgtcatcatcccgtatgaaggtctgagcggcgaccaaatgggccagatcgaaaaaatttttaaggtggtgtaccctgtggatgatcatcactttaaggtgatcctgcactatggcacactggtaatcgacgccgttacgccgaacatgatcgactatttcggacggccgtatgaaggcatcgccgtgttcgacggcaaaaagatcactgtaacagggaccctgtggaacggcaacaaaattatcgacgagcgcctgatcaaccccgacggctccctgctgttccgagtaaccatcaacgtt

SEQ ID NO: 520 - protein, 159 aa, Artificial Sequence
  Synthetic
MVFTLEDFVGDWRQTAGYNLDQVLEQGGVSSLFQNLGVSVTPIQRIVLSGENGLKIDIHVIIPYEGLSGDQMGQIEKIFKVVYPVDDHHFKVILHYGTLVIDAVTPNMIDYFGRPYEGIAVFDGKKITVTGTLWNGNKIIDERLINPDGSLLFRVTINV

SEQ ID NO: 521 - DNA, 477 bp, Artificial Sequence
  Synthetic
atggtcttcacactcgaagatttcgttggggactggcgacagacagccggctacaacctggaccaagtccttgaacagggaggtgtgtccagtttgtttcagaatctcggggtgtccgtaactccgatccaaaggattgtcctgagcggtgaaaatgggctgaagatcgacatccatgtcatcatcccgtatgaaggtctgagcggcgaccaaatgggccagatcgaaaaaatttttaaggtggtgtaccctgtggatgatcatcactttaaggtgatcctgcactatggcacactggtaatcgacggggttacgccgaacatgatcgactatttcgcccggccgtatgaaggcatcgccgtgttcgacggcaaaaagatcactgtaacagggaccctgtggaacggcaacaaaattatcgacgagcgcctgatcaaccccgacggctccctgctgttccgagtaaccatcaacgtt

SEQ ID NO: 522 - protein, 159 aa, Artificial Sequence
  Synthetic
MVFTLEDFVGDWRQTAGYNLDQVLEQGGVSSLFQNLGVSVTPIQRIVLSGENGLKIDIHVIIPYEGLSGDQMGQIEKIFKVVYPVDDHHFKVILHYGTLVIDGVTPNMIDYFARPYEGIAVFDGKKITVTGTLWNGNKIIDERLINPDGSLLFRVTINV

SEQ ID NO: 523 - DNA, 477 bp, Artificial Sequence
  Synthetic
atggtcttcacactcgaagatttcgttggggactggcgacagacagccggctacaacctggaccaagtccttgaacagggaggtgtgtccagtttgtttcagaatctcggggtgtccgtaactccgatccaaaggattgtcctgagcggtgaaaatgggctgaagatcgacatccatgtcatcatcccgtatgaaggtctgagcggcgaccaaatgggccagatcgaaaaaatttttaaggtggtgtaccctgtggatgatcatcactttaaggtgatcctgcactatggcacactggtaatcgacggggttacgccgaacatgatcgactatttcggacggccgtatgaagccatcgccgtgttcgacggcaaaaagatcactgtaacagggaccctgtggaacggcaacaaaattatcgacgagcgcctgatcaaccccgacggctccctgctgttccgagtaaccatcaacgtt

SEQ ID NO: 524 - protein, 159 aa, Artificial Sequence
  Synthetic
MVFTLEDFVGDWRQTAGYNLDQVLEQGGVSSLFQNLGVSVTPIQRIVLSGENGLKIDIHVIIPYEGLSGDQMGQIEKIFKVVYPVDDHHFKVILHYGTLVIDGVTPNMIDYFGRPYEAIAVFDGKKITVTGTLWNGNKIIDERLINPDGSLLFRVTINV

SEQ ID NO: 525 - DNA, 477 bp, Artificial Sequence
  Synthetic
atggtcttcacactcgaagatttcgttggggactggcgacagacagccggctacaacctggaccaagtccttgaacagggaggtgtgtccagtttgtttcagaatctcggggtgtccgtaactccgatccaaaggattgtcctgagcggtgaaaatgggctgaagatcgacatccatgtcatcatcccgtatgaaggtctgagcggcgaccaaatgggccagatcgaaaaaatttttaaggtggtgtaccctgtggatgatcatcactttaaggtgatcctgcactatggcacactggtaatcgacggggttacgccgaacatgatcgactatttcggacggccgtatgaaggcatcgccgtgttcgacgccaaaaagatcactgtaacagggaccctgtggaacggcaacaaaattatcgacgagcgcctgatcaaccccgacggctccctgctgttccgagtaaccatcaacgtt

SEQ ID NO: 526 - protein, 159 aa, Artificial Sequence
  Synthetic
MVFTLEDFVGDWRQTAGYNLDQVLEQGGVSSLFQNLGVSVTPIQRIVLSGENGLKIDIHVIIPYEGLSGDQMGQIEKIFKVVYPVDDHHFKVILHYGTLVIDGVTPNMIDYFGRPYEGIAVFDAKKITVTGTLWNGNKIIDERLINPDGSLLFRVTINV

SEQ ID NO: 527 - DNA, 477 bp, Artificial Sequence
  Synthetic
atggtcttcacactcgaagatttcgttggggactggcgacagacagccggctacaacctggaccaagtccttgaacagggaggtgtgtccagtttgtttcagaatctcggggtgtccgtaactccgatccaaaggattgtcctgagcggtgaaaatgggctgaagatcgacatccatgtcatcatcccgtatgaaggtctgagcggcgaccaaatgggccagatcgaaaaaatttttaaggtggtgtaccctgtggatgatcatcactttaaggtgatcctgcactatggcacactggtaatcgacggggttacgccgaacatgatcgactatttcggacggccgtatgaaggcatcgccgtgttcgacggcaaaaagatcactgtaacagccaccctgtggaacggcaacaaaattatcgacgagcgcctgatcaaccccgacggctccctgctgttccgagtaaccatcaacgtt

SEQ ID NO: 528 - protein, 159 aa, Artificial Sequence
  Synthetic
MVFTLEDFVGDWRQTAGYNLDQVLEQGGVSSLFQNLGVSVTPIQRIVLSGENGLKIDIHVIIPYEGLSGDQMGQIEKIFKVVYPVDDHHFKVILHYGTLVIDGVTPNMIDYFGRPYEGIAVFDGKKITVTATLWNGNKIIDERLINPDGSLLFRVTINV

SEQ ID NO: 529 - DNA, 477 bp, Artificial Sequence
  Synthetic
atggtcttcacactcgaagatttcgttggggactggcgacagacagccggctacaacctggaccaagtccttgaacagggaggtgtgtccagtttgtttcagaatctcggggtgtccgtaactccgatccaaaggattgtcctgagcggtgaaaatgggctgaagatcgacatccatgtcatcatcccgtatgaaggtctgagcggcgaccaaatgggccagatcgaaaaaatttttaaggtggtgtaccctgtggatgatcatcactttaaggtgatcctgcactatggcacactggtaatcgacggggttacgccgaacatgatcgactatttcggacggccgtatgaaggcatcgccgtgttcgacggcaaaaagatcactgtaacagggaccctgtggaacgccaacaaaattatcgacgagcgcctgatcaaccccgacggctccctgctgttccgagtaaccatcaacgtt

SEQ ID NO: 530 - protein, 159 aa, Artificial Sequence
  Synthetic
MVFTLEDFVGDWRQTAGYNLDQVLEQGGVSSLFQNLGVSVTPIQRIVLSGENGLKIDIHVIIPYEGLSGDQMGQIEKIFKVVYPVDDHHFKVILHYGTLVIDGVTPNMIDYFGRPYEGIAVFDGKKITVTGTLWNANKIIDERLINPDGSLLFRVTINV

SEQ ID NO: 531 - DNA, 477 bp, Artificial Sequence
  Synthetic
atggtcttcacactcgaagatttcgttggggactggcgacagacagccggctacaacctggaccaagtccttgaacagggaggtgtgtccagtttgtttcagaatctcggggtgtccgtaactccgatccaaaggattgtcctgagcggtgaaaatgggctgaagatcgacatccatgtcatcatcccgtatgaaggtctgagcggcgaccaaatgggccagatcgaaaaaatttttaaggtggtgtaccctgtggatgatcatcactttaaggtgatcctgcactatggcacactggtaatcgacggggttacgccgaacatgatcgactatttcggacggccgtatgaaggcatcgccgtgttcgacggcaaaaagatcactgtaacagggaccctgtggaacggcaacaaaattatcgacgagcgcctgatcaaccccgacgcctccctgctgttccgagtaaccatcaacgtt

SEQ ID NO: 532 - protein, 159 aa, Artificial Sequence
  Synthetic
MVFTLEDFVGDWRQTAGYNLDQVLEQGGVSSLFQNLGVSVTPIQRIVLSGENGLKIDIHVIIPYEGLSGDQMGQIEKIFKVVYPVDDHHFKVILHYGTLVIDGVTPNMIDYFGRPYEGIAVFDGKKITVTGTLWNGNKIIDERLINPDASLLFRVTINV

SEQ ID NO: 533 - DNA, 477 bp, Artificial Sequence
  Synthetic
atggtcttcacactcgaagatttcgttggggactggcgacagacagccggctacaacctggaccaagtccttgaacagggaggtgtgtccagtttgtttcagaatctcggggtgtccgtaactccgatccaaaggattgtcctgagcggtgaaaatgggctgaaggccgacatccatgtcatcatcccgtatgaaggtctgagcggcgaccaaatgggccagatcgaaaaaatttttaaggtggtgtaccctgtggatgatcatcactttaaggtgatcctgcactatggcacactggtaatcgacggggttacgccgaacatgatcgactatttcggacggccgtatgaaggcatcgccgtgttcgacggcaaaaagatcactgtaacagggaccctgtggaacggcaacaaaattatcgacgagcgcctgatcaaccccgacggctccctgctgttccgagtaaccatcaacgtt

SEQ ID NO: 534 - protein, 159 aa, Artificial Sequence
  Synthetic
MVFTLEDFVGDWRQTAGYNLDQVLEQGGVSSLFQNLGVSVTPIQRIVLSGENGLKADIHVIIPYEGLSGDQMGQIEKIFKVVYPVDDHHFKVILHYGTLVIDGVTPNMIDYFGRPYEGIAVFDGKKITVTGTLWNGNKIIDERLINPDGSLLFRVTINV

SEQ ID NO: 535 - DNA, 477 bp, Artificial Sequence
  Synthetic
atggtcttcacactcgaagatttcgttggggactggcgacagacagccgcctacaacctggcccaagtccttgaacagggaggtgtgtccagtttgtttcagaatctcgccgtgtccgtaactccgatccaaaggattgtcctgagcggtgaaaatgccctgaagatcgacatccatgtcatcatcccgtatgaaggtctgagcgccgaccaaatgggccagatcgaaaaaatttttaaggtggtgtaccctgtggatgatcatcactttaaggtgatcctgcactatggcacactggtaatcgacggggttacgccgaacatgatcgactatttcggacggccgtatgaaggcatcgccgtgttcgacggcaaaaagatcactgtaacagggaccctgtggaacggcaacaaaattatcgacgagcgcctgatcaaccccgacggctccctgctgttccgagtaaccatcaacgtt

SEQ ID NO: 536 - protein, 159 aa, Artificial Sequence
  Synthetic
MVFTLEDFVGDWRQTAAYNLAQVLEQGGVSSLFQNLAVSVTPIQRIVLSGENALKIDIHVIIPYEGLSADQMGQIEKIFKVVYPVDDHHFKVILHYGTLVIDGVTPNMIDYFGRPYEGIAVFDGKKITVTGTLWNGNKIIDERLINPDGSLLFRVTINV

SEQ ID NO: 537 - DNA, 477 bp, Artificial Sequence
  Synthetic
atggtcttcacactcgaagatttcgttggggactggcgacagacagccgcctacaacctggaccaagtccttgaacagggaggtgtgtccagtttgtttcagaatctcgccgtgtccgtaactccgatccaaaggattgtcctgagcggtgaaaatgggctgaagatcgacatccatgtcatcatcccgtatgaaggtctgagcgccgaccaaatggcccagatcgaaaaaatttttaaggtggtgtaccctgtggatgatcatcactttaaggtgatcctgcactatggcacactggtaatcgacggggttacgccgaacatgatcgactatttcggacggccgtatgaaggcatcgccgtgttcgacggcaaaaagatcactgtaacagggaccctgtggaacggcaacaaaattatcgacgagcgcctgatcaaccccgacggctccctgctgttccgagtaaccatcaacgtt

SEQ ID NO: 538 - protein, 159 aa, Artificial Sequence
  Synthetic
MVFTLEDFVGDWRQTAAYNLDQVLEQGGVSSLFQNLAVSVTPIQRIVLSGENGLKIDIHVIIPYEGLSADQMAQIEKIFKVVYPVDDHHFKVILHYGTLVIDGVTPNMIDYFGRPYEGIAVFDGKKITVTGTLWNGNKIIDERLINPDGSLLFRVTINV

SEQ ID NO: 539 - DNA, 477 bp, Artificial Sequence
  Synthetic
atggtcttcacactcgaagatttcgttggggactggcgacagacagccgcctacaacctggaccaagtccttgaacagggaggtgtgtccagtttgtttcagaatctcgccgtgtccgtaactccgatccaaaggattgtcctgagcggtgaaaatgccctgaagatcgacatccatgtcatcatcccgtatgaaggtctgagcgccgaccaaatggcccagatcgaaaaaatttttaaggtggtgtaccctgtggatgatcatcactttaaggtgatcctgcactatggcacactggtaatcgacggggttacgccgaacatgatcgactatttcggacggccgtatgaaggcatcgccgtgttcgacggcaaaaagatcactgtaacagggaccctgtggaacggcaacaaaattatcgacgagcgcctgatcaaccccgacggctccctgctgttccgagtaaccatcaacgtt

SEQ ID NO: 540 - protein, 159 aa, Artificial Sequence
  Synthetic
MVFTLEDFVGDWRQTAAYNLDQVLEQGGVSSLFQNLAVSVTPIQRIVLSGENALKIDIHVIIPYEGLSADQMAQIEKIFKVVYPVDDHHFKVILHYGTLVIDGVTPNMIDYFGRPYEGIAVFDGKKITVTGTLWNGNKIIDERLINPDGSLLFRVTINV

SEQ ID NO: 541 - DNA, 477 bp, Artificial Sequence
  Synthetic
atggtcttcacactcgaagatttcgttggggactggcgacagacagccggctacaacctggaccaagtccttgaacagggaggtgtgtccagtttgtttcagaatctcgccgtgtccgtaactccgatccaaaggattgtcctgagcggtgaaaatgccctgaagatcgacatccatgtcatcatcccgtatgaaggtctgagcgccgaccaaatggcccagatcgaaaaaatttttaaggtggtgtaccctgtggatgatcatcactttaaggtgatcctgcactatggcacactggtaatcgacggggttacgccgaacatgatcgactatttcggacggccgtatgaaggcatcgccgtgttcgacggcaaaaagatcactgtaacagggaccctgtggaacggcaacaaaattatcgacgagcgcctgatcaaccccgacggctccctgctgttccgagtaaccatcaacgtt

SEQ ID NO: 542 - protein, 159 aa, Artificial Sequence
  Synthetic
MVFTLEDFVGDWRQTAGYNLDQVLEQGGVSSLFQNLAVSVTPIQRIVLSGENALKIDIHVIIPYEGLSADQMAQIEKIFKVVYPVDDHHFKVILHYGTLVIDGVTPNMIDYFGRPYEGIAVFDGKKITVTGTLWNGNKIIDERLINPDGSLLFRVTINV

SEQ ID NO: 543 - DNA, 477 bp, Artificial Sequence
  Synthetic
atggtcttcacactcgaagatttcgttggggactggcgacagacagccgcctacaacctggaccaagtccttgaacagggaggtgtgtccagtttgtttcagaatctcggggtgtccgtaactccgatccaaaggattgtcctgagcggtgaaaatgccctgaagatcgacatccatgtcatcatcccgtatgaaggtctgagcgccgaccaaatggcccagatcgaaaaaatttttaaggtggtgtaccctgtggatgatcatcactttaaggtgatcctgcactatggcacactggtaatcgacggggttacgccgaacatgatcgactatttcggacggccgtatgaaggcatcgccgtgttcgacggcaaaaagatcactgtaacagggaccctgtggaacggcaacaaaattatcgacgagcgcctgatcaaccccgacggctccctgctgttccgagtaaccatcaacgtt

SEQ ID NO: 544 - protein, 159 aa, Artificial Sequence
  Synthetic
MVFTLEDFVGDWRQTAAYNLDQVLEQGGVSSLFQNLGVSVTPIQRIVLSGENALKIDIHVIIPYEGLSADQMAQIEKIFKVVYPVDDHHFKVILHYGTLVIDGVTPNMIDYFGRPYEGIAVFDGKKITVTGTLWNGNKIIDERLINPDGSLLFRVTINV

SEQ ID NO: 545 - DNA, 477 bp, Artificial Sequence; identical to SEQ ID NO: 537
  Synthetic

SEQ ID NO: 546 - protein, 159 aa, Artificial Sequence; identical to SEQ ID NO: 538
  Synthetic

SEQ ID NO: 547 - DNA, 477 bp, Artificial Sequence
  Synthetic
atggtcttcacactcgaagatttcgttggggactggcgacagacagccgcctacaacctggaccaagtccttgaacagggaggtgtgtccagtttgtttcagaatctcgccgtgtccgtaactccgatccaaaggattgtcctgagcggtgaaaatgccctgaagatcgacatccatgtcatcatcccgtatgaaggtctgagcggcgaccaaatggcccagatcgaaaaaatttttaaggtggtgtaccctgtggatgatcatcactttaaggtgatcctgcactatggcacactggtaatcgacggggttacgccgaacatgatcgactatttcggacggccgtatgaaggcatcgccgtgttcgacggcaaaaagatcactgtaacagggaccctgtggaacggcaacaaaattatcgacgagcgcctgatcaaccccgacggctccctgctgttccgagtaaccatcaacgtt

SEQ ID NO: 548 - protein, 159 aa, Artificial Sequence
  Synthetic
MVFTLEDFVGDWRQTAAYNLDQVLEQGGVSSLFQNLAVSVTPIQRIVLSGENALKIDIHVIIPYEGLSGDQMAQIEKIFKVVYPVDDHHFKVILHYGTLVIDGVTPNMIDYFGRPYEGIAVFDGKKITVTGTLWNGNKIIDERLINPDGSLLFRVTINV

SEQ ID NO: 549 - DNA, 477 bp, Artificial Sequence
  Synthetic
atggtcttcacactcgaagatttcgttggggactggcgacagacagccgcctacaacctggaccaagtccttgaacagggaggtgtgtccagtttgtttcagaatctcgccgtgtccgtaactccgatccaaaggattgtcctgagcggtgaaaatgccctgaagatcgacatccatgtcatcatcccgtatgaaggtctgagcgccgaccaaatgggccagatcgaaaaaatttttaaggtggtgtaccctgtggatgatcatcactttaaggtgatcctgcactatggcacactggtaatcgacggggttacgccgaacatgatcgactatttcggacggccgtatgaaggcatcgccgtgttcgacggcaaaaagatcactgtaacagggaccctgtggaacggcaacaaaattatcgacgagcgcctgatcaaccccgacggctccctgctgttccgagtaaccatcaacgtt

SEQ ID NO: 550 - protein, 159 aa, Artificial Sequence
  Synthetic
MVFTLEDFVGDWRQTAAYNLDQVLEQGGVSSLFQNLAVSVTPIQRIVLSGENALKIDIHVIIPYEGLSADQMGQIEKIFKVVYPVDDHHFKVILHYGTLVIDGVTPNMIDYFGRPYEGIAVFDGKKITVTGTLWNGNKIIDERLINPDGSLLFRVTINV

SEQ ID NO: 551 - DNA, 477 bp, Artificial Sequence
  Synthetic
atggtcttcacactcgaagatttcgttggggactgggcccagacagccgcctacaacctggaccaagtccttgaacagggaggtgtgtccagtttgtttcagaatctcgccgtgtccgtaactccgatccaaaggattgtcctgagcggtgaaaatgccctgaagatcgacatccatgtcatcatcccgtatgaaggtctgagcgccgaccaaatggcccagatcgaaaaaatttttaaggtggtgtaccctgtggatgatcatcactttaaggtgatcctgcactatggcacactggtaatcgacggggttacgccgaacatgatcgactatttcggacggccgtatgaaggcatcgccgtgttcgacggcaaaaagatcactgtaacagggaccctgtggaacggcaacaaaattatcgacgagcgcctgatcaaccccgacggctccctgctgttccgagtaaccatcaacgtt

SEQ ID NO: 552 - protein, 159 aa, Artificial Sequence
  Synthetic
MVFTLEDFVGDWAQTAAYNLDQVLEQGGVSSLFQNLAVSVTPIQRIVLSGENALKIDIHVIIPYEGLSADQMAQIEKIFKVVYPVDDHHFKVILHYGTLVIDGVTPNMIDYFGRPYEGIAVFDGKKITVTGTLWNGNKIIDERLINPDGSLLFRVTINV

SEQ ID NO: 553 - DNA, 477 bp, Artificial Sequence
  Synthetic
atggtcttcacactcgaagatttcgttggggactggtgccagacagccgcctacaacctggaccaagtccttgaacagggaggtgtgtccagtttgtttcagaatctcgccgtgtccgtaactccgatccaaaggattgtcctgagcggtgaaaatgccctgaagatcgacatccatgtcatcatcccgtatgaaggtctgagcgccgaccaaatggcccagatcgaaaaaatttttaaggtggtgtaccctgtggatgatcatcactttaaggtgatcctgcactatggcacactggtaatcgacggggttacgccgaacatgatcgactatttcggacggccgtatgaaggcatcgccgtgttcgacggcaaaaagatcactgtaacagggaccctgtggaacggcaacaaaattatcgacgagcgcctgatcaaccccgacggctccctgctgttccgagtaaccatcaacgtt

SEQ ID NO: 554 - protein, 159 aa, Artificial Sequence
  Synthetic
MVFTLEDFVGDWCQTAAYNLDQVLEQGGVSSLFQNLAVSVTPIQRIVLSGENALKIDIHVIIPYEGLSADQMAQIEKIFKVVYPVDDHHFKVILHYGTLVIDGVTPNMIDYFGRPYEGIAVFDGKKITVTGTLWNGNKIIDERLINPDGSLLFRVTINV

SEQ ID NO: 555 - DNA, 477 bp, Artificial Sequence
  Synthetic
atggtcttcacactcgaagatttcgttggggactgggaccagacagccgcctacaacctggaccaagtccttgaacagggaggtgtgtccagtttgtttcagaatctcgccgtgtccgtaactccgatccaaaggattgtcctgagcggtgaaaatgccctgaagatcgacatccatgtcatcatcccgtatgaaggtctgagcgccgaccaaatggcccagatcgaaaaaatttttaaggtggtgtaccctgtggatgatcatcactttaaggtgatcctgcactatggcacactggtaatcgacggggttacgccgaacatgatcgactatttcggacggccgtatgaaggcatcgccgtgttcgacggcaaaaagatcactgtaacagggaccctgtggaacggcaacaaaattatcgacgagcgcctgatcaaccccgacggctccctgctgttccgagtaaccatcaacgtt

SEQ ID NO: 556 - protein, 159 aa, Artificial Sequence
  Synthetic
MVFTLEDFVGDWDQTAAYNLDQVLEQGGVSSLFQNLAVSVTPIQRIVLSGENALKIDIHVIIPYEGLSADQMAQIEKIFKVVYPVDDHHFKVILHYGTLVIDGVTPNMIDYFGRPYEGIAVFDGKKITVTGTLWNGNKIIDERLINPDGSLLFRVTINV

SEQ ID NO: 557 - DNA, 477 bp, Artificial Sequence
  Synthetic
atggtcttcacactcgaagatttcgttggggactgggagcagacagccgcctacaacctggaccaagtccttgaacagggaggtgtgtccagtttgtttcagaatctcgccgtgtccgtaactccgatccaaaggattgtcctgagcggtgaaaatgccctgaagatcgacatccatgtcatcatcccgtatgaaggtctgagcgccgaccaaatggcccagatcgaaaaaatttttaaggtggtgtaccctgtggatgatcatcactttaaggtgatcctgcactatggcacactggtaatcgacggggttacgccgaacatgatcgactatttcggacggccgtatgaaggcatcgccgtgttcgacggcaaaaagatcactgtaacagggaccctgtggaacggcaacaaaattatcgacgagcgcctgatcaaccccgacggctccctgctgttccgagtaaccatcaacgtt

SEQ ID NO: 558 - protein, 159 aa, Artificial Sequence
  Synthetic
MVFTLEDFVGDWEQTAAYNLDQVLEQGGVSSLFQNLAVSVTPIQRIVLSGENALKIDIHVIIPYEGLSADQMAQIEKIFKVVYPVDDHHFKVILHYGTLVIDGVTPNMIDYFGRPYEGIAVFDGKKITVTGTLWNGNKIIDERLINPDGSLLFRVTINV

SEQ ID NO: 559 - DNA, 477 bp, Artificial Sequence
  Synthetic
atggtcttcacactcgaagatttcgttggggactggttccagacagccgcctacaacctggaccaagtccttgaacagggaggtgtgtccagtttgtttcagaatctcgccgtgtccgtaactccgatccaaaggattgtcctgagcggtgaaaatgccctgaagatcgacatccatgtcatcatcccgtatgaaggtctgagcgccgaccaaatggcccagatcgaaaaaatttttaaggtggtgtaccctgtggatgatcatcactttaaggtgatcctgcactatggcacactggtaatcgacggggttacgccgaacatgatcgactatttcggacggccgtatgaaggcatcgccgtgttcgacggcaaaaagatcactgtaacagggaccctgtggaacggcaacaaaattatcgacgagcgcctgatcaaccccgacggctccctgctgttccgagtaaccatcaacgtt

SEQ ID NO: 560 - protein, 159 aa, Artificial Sequence
  Synthetic
MVFTLEDFVGDWFQTAAYNLDQVLEQGGVSSLFQNLAVSVTPIQRIVLSGENALKIDIHVIIPYEGLSADQMAQIEKIFKVVYPVDDHHFKVILHYGTLVIDGVTPNMIDYFGRPYEGIAVFDGKKITVTGTLWNGNKIIDERLINPDGSLLFRVTINV

SEQ ID NO: 561 - DNA, 477 bp, Artificial Sequence
  Synthetic
atggtcttcacactcgaagatttcgttggggactggggccagacagccgcctacaacctggaccaagtccttgaacagggaggtgtgtccagtttgtttcagaatctcgccgtgtccgtaactccgatccaaaggattgtcctgagcggtgaaaatgccctgaagatcgacatccatgtcatcatcccgtatgaaggtctgagcgccgaccaaatggcccagatcgaaaaaatttttaaggtggtgtaccctgtggatgatcatcactttaaggtgatcctgcactatggcacactggtaatcgacggggttacgccgaacatgatcgactatttcggacggccgtatgaaggcatcgccgtgttcgacggcaaaaagatcactgtaacagggaccctgtggaacggcaacaaaattatcgacgagcgcctgatcaaccccgacggctccctgctgttccgagtaaccatcaacgtt

SEQ ID NO: 562 - protein, 159 aa, Artificial Sequence
  Synthetic
MVFTLEDFVGDWGQTAAYNLDQVLEQGGVSSLFQNLAVSVTPIQRIVLSGENALKIDIHVIIPYEGLSADQMAQIEKIFKVVYPVDDHHFKVILHYGTLVIDGVTPNMIDYFGRPYEGIAVFDGKKITVTGTLWNGNKIIDERLINPDGSLLFRVTINV

SEQ ID NO: 563 - DNA, 477 bp, Artificial Sequence
  Synthetic
atggtcttcacactcgaagatttcgttggggactggcaccagacagccgcctacaacctggaccaagtccttgaacagggaggtgtgtccagtttgtttcagaatctcgccgtgtccgtaactccgatccaaaggattgtcctgagcggtgaaaatgccctgaagatcgacatccatgtcatcatcccgtatgaaggtctgagcgccgaccaaatggcccagatcgaaaaaatttttaaggtggtgtaccctgtggatgatcatcactttaaggtgatcctgcactatggcacactggtaatcgacggggttacgccgaacatgatcgactatttcggacggccgtatgaaggcatcgccgtgttcgacggcaaaaagatcactgtaacagggaccctgtggaacggcaacaaaattatcgacgagcgcctgatcaaccccgacggctccctgctgttccgagtaaccatcaacgtt

SEQ ID NO: 564 - protein, 159 aa, Artificial Sequence
  Synthetic
MVFTLEDFVGDWHQTAAYNLDQVLEQGGVSSLFQNLAVSVTPIQRIVLSGENALKIDIHVIIPYEGLSADQMAQIEKIFKVVYPVDDHHFKVILHYGTLVIDGVTPNMIDYFGRPYEGIAVFDGKKITVTGTLWNGNKIIDERLINPDGSLLFRVTINV

SEQ ID NO: 565 - DNA, 477 bp, Artificial Sequence
  Synthetic
atggtcttcacactcgaagatttcgttggggactggatccagacagccgcctacaacctggaccaagtccttgaacagggaggtgtgtccagtttgtttcagaatctcgccgtgtccgtaactccgatccaaaggattgtcctgagcggtgaaaatgccctgaagatcgacatccatgtcatcatcccgtatgaaggtctgagcgccgaccaaatggcccagatcgaaaaaatttttaaggtggtgtaccctgtggatgatcatcactttaaggtgatcctgcactatggcacactggtaatcgacggggttacgccgaacatgatcgactatttcggacggccgtatgaaggcatcgccgtgttcgacggcaaaaagatcactgtaacagggaccctgtggaacggcaacaaaattatcgacgagcgcctgatcaaccccgacggctccctgctgttccgagtaaccatcaacgtt

SEQ ID NO: 566 - protein, 159 aa, Artificial Sequence
  Synthetic
MVFTLEDFVGDWIQTAAYNLDQVLEQGGVSSLFQNLAVSVTPIQRIVLSGENALKIDIHVIIPYEGLSADQMAQIEKIFKVVYPVDDHHFKVILHYGTLVIDGVTPNMIDYFGRPYEGIAVFDGKKITVTGTLWNGNKIIDERLINPDGSLLFRVTINV

SEQ ID NO: 567 - DNA, 477 bp, Artificial Sequence
  Synthetic
atggtcttcacactcgaagatttcgttggggactggaagcagacagccgcctacaacctggaccaagtccttgaacagggaggtgtgtccagtttgtttcagaatctcgccgtgtccgtaactccgatccaaaggattgtcctgagcggtgaaaatgccctgaagatcgacatccatgtcatcatcccgtatgaaggtctgagcgccgaccaaatggcccagatcgaaaaaatttttaaggtggtgtaccctgtggatgatcatcactttaaggtgatcctgcactatggcacactggtaatcgacggggttacgccgaacatgatcgactatttcggacggccgtatgaaggcatcgccgtgttcgacggcaaaaagatcactgtaacagggaccctgtggaacggcaacaaaattatcgacgagcgcctgatcaaccccgacggctccctgctgttccgagtaaccatcaacgtt

SEQ ID NO: 568 - protein, 159 aa, Artificial Sequence
  Synthetic
MVFTLEDFVGDWKQTAAYNLDQVLEQGGVSSLFQNLAVSVTPIQRIVLSGENALKIDIHVIIPYEGLSADQMAQIEKIFKVVYPVDDHHFKVILHYGTLVIDGVTPNMIDYFGRPYEGIAVFDGKKITVTGTLWNGNKIIDERLINPDGSLLFRVTINV

SEQ ID NO: 569 - DNA, 477 bp, Artificial Sequence
  Synthetic
atggtcttcacactcgaagatttcgttggggactggctgcagacagccgcctacaacctggaccaagtccttgaacagggaggtgtgtccagtttgtttcagaatctcgccgtgtccgtaactccgatccaaaggattgtcctgagcggtgaaaatgccctgaagatcgacatccatgtcatcatcccgtatgaaggtctgagcgccgaccaaatggcccagatcgaaaaaatttttaaggtggtgtaccctgtggatgatcatcactttaaggtgatcctgcactatggcacactggtaatcgacggggttacgccgaacatgatcgactatttcggacggccgtatgaaggcatcgccgtgttcgacggcaaaaagatcactgtaacagggaccctgtggaacggcaacaaaattatcgacgagcgcctgatcaaccccgacggctccctgctgttccgagtaaccatcaacgtt

SEQ ID NO: 570 - protein, 159 aa, Artificial Sequence
  Synthetic
MVFTLEDFVGDWLQTAAYNLDQVLEQGGVSSLFQNLAVSVTPIQRIVLSGENALKIDIHVIIPYEGLSADQMAQIEKIFKVVYPVDDHHFKVILHYGTLVIDGVTPNMIDYFGRPYEGIAVFDGKKITVTGTLWNGNKIIDERLINPDGSLLFRVTINV

SEQ ID NO: 571 - DNA, 477 bp, Artificial Sequence
  Synthetic
atggtcttcacactcgaagatttcgttggggactggatgcagacagccgcctacaacctggaccaagtccttgaacagggaggtgtgtccagtttgtttcagaatctcgccgtgtccgtaactccgatccaaaggattgtcctgagcggtgaaaatgccctgaagatcgacatccatgtcatcatcccgtatgaaggtctgagcgccgaccaaatggcccagatcgaaaaaatttttaaggtggtgtaccctgtggatgatcatcactttaaggtgatcctgcactatggcacactggtaatcgacggggttacgccgaacatgatcgactatttcggacggccgtatgaaggcatcgccgtgttcgacggcaaaaagatcactgtaacagggaccctgtggaacggcaacaaaattatcgacgagcgcctgatcaaccccgacggctccctgctgttccgagtaaccatcaacgtt

SEQ ID NO: 572 - protein, 159 aa, Artificial Sequence
  Synthetic
MVFTLEDFVGDWMQTAAYNLDQVLEQGGVSSLFQNLAVSVTPIQRIVLSGENALKIDIHVIIPYEGLSADQMAQIEKIFKVVYPVDDHHFKVILHYGTLVIDGVTPNMIDYFGRPYEGIAVFDGKKITVTGTLWNGNKIIDERLINPDGSLLFRVTINV

SEQ ID NO: 573 - DNA, 477 bp, Artificial Sequence
  Synthetic
atggtcttcacactcgaagatttcgttggggactggaaccagacagccgcctacaacctggaccaagtccttgaacagggaggtgtgtccagtttgtttcagaatctcgccgtgtccgtaactccgatccaaaggattgtcctgagcggtgaaaatgccctgaagatcgacatccatgtcatcatcccgtatgaaggtctgagcgccgaccaaatggcccagatcgaaaaaatttttaaggtggtgtaccctgtggatgatcatcactttaaggtgatcctgcactatggcacactggtaatcgacggggttacgccgaacatgatcgactatttcggacggccgtatgaaggcatcgccgtgttcgacggcaaaaagatcactgtaacagggaccctgtggaacggcaacaaaattatcgacgagcgcctgatcaaccccgacggctccctgctgttccgagtaaccatcaacgtt

SEQ ID NO: 574 - protein, 159 aa, Artificial Sequence
  Synthetic
MVFTLEDFVGDWNQTAAYNLDQVLEQGGVSSLFQNLAVSVTPIQRIVLSGENALKIDIHVIIPYEGLSADQMAQIEKIFKVVYPVDDHHFKVILHYGTLVIDGVTPNMIDYFGRPYEGIAVFDGKKITVTGTLWNGNKIIDERLINPDGSLLFRVTINV

SEQ ID NO: 575 - DNA, 477 bp, Artificial Sequence
  Synthetic
atggtcttcacactcgaagatttcgttggggactggccccagacagccgcctacaacctggaccaagtccttgaacagggaggtgtgtccagtttgtttcagaatctcgccgtgtccgtaactccgatccaaaggattgtcctgagcggtgaaaatgccctgaagatcgacatccatgtcatcatcccgtatgaaggtctgagcgccgaccaaatggcccagatcgaaaaaatttttaaggtggtgtaccctgtggatgatcatcactttaaggtgatcctgcactatggcacactggtaatcgacggggttacgccgaacatgatcgactatttcggacggccgtatgaaggcatcgccgtgttcgacggcaaaaagatcactgtaacagggaccctgtggaacggcaacaaaattatcgacgagcgcctgatcaaccccgacggctccctgctgttccgagtaaccatcaacgtt

SEQ ID NO: 576 - protein, 159 aa, Artificial Sequence
  Synthetic
MVFTLEDFVGDWPQTAAYNLDQVLEQGGVSSLFQNLAVSVTPIQRIVLSGENALKIDIHVIIPYEGLSADQMAQIEKIFKVVYPVDDHHFKVILHYGTLVIDGVTPNMIDYFGRPYEGIAVFDGKKITVTGTLWNGNKIIDERLINPDGSLLFRVTINV

SEQ ID NO: 577 - DNA, 477 bp, Artificial Sequence
  Synthetic
atggtcttcacactcgaagatttcgttggggactggcagcagacagccgcctacaacctggaccaagtccttgaacagggaggtgtgtccagtttgtttcagaatctcgccgtgtccgtaactccgatccaaaggattgtcctgagcggtgaaaatgccctgaagatcgacatccatgtcatcatcccgtatgaaggtctgagcgccgaccaaatggcccagatcgaaaaaatttttaaggtggtgtaccctgtggatgatcatcactttaaggtgatcctgcactatggcacactggtaatcgacggggttacgccgaacatgatcgactatttcggacggccgtatgaaggcatcgccgtgttcgacggcaaaaagatcactgtaacagggaccctgtggaacggcaacaaaattatcgacgagcgcctgatcaaccccgacggctccctgctgttccgagtaaccatcaacgtt

SEQ ID NO: 578 - protein, 159 aa, Artificial Sequence
  Synthetic
MVFTLEDFVGDWQQTAAYNLDQVLEQGGVSSLFQNLAVSVTPIQRIVLSGENALKIDIHVIIPYEGLSADQMAQIEKIFKVVYPVDDHHFKVILHYGTLVIDGVTPNMIDYFGRPYEGIAVFDGKKITVTGTLWNGNKIIDERLINPDGSLLFRVTINV

SEQ ID NO: 579 - DNA, 477 bp, Artificial Sequence
  Synthetic
atggtcttcacactcgaagatttcgttggggactggagccagacagccgcctacaacctggaccaagtccttgaacagggaggtgtgtccagtttgtttcagaatctcgccgtgtccgtaactccgatccaaaggattgtcctgagcggtgaaaatgccctgaagatcgacatccatgtcatcatcccgtatgaaggtctgagcgccgaccaaatggcccagatcgaaaaaatttttaaggtggtgtaccctgtggatgatcatcactttaaggtgatcctgcactatggcacactggtaatcgacggggttacgccgaacatgatcgactatttcggacggccgtatgaaggcatcgccgtgttcgacggcaaaaagatcactgtaacagggaccctgtggaacggcaacaaaattatcgacgagcgcctgatcaaccccgacggctccctgctgttccgagtaaccatcaacgtt

SEQ ID NO: 580 - protein, 159 aa, Artificial Sequence
  Synthetic
MVFTLEDFVGDWSQTAAYNLDQVLEQGGVSSLFQNLAVSVTPIQRIVLSGENALKIDIHVIIPYEGLSADQMAQIEKIFKVVYPVDDHHFKVILHYGTLVIDGVTPNMIDYFGRPYEGIAVFDGKKITVTGTLWNGNKIIDERLINPDGSLLFRVTINV

SEQ ID NO: 581 - DNA, 477 bp, Artificial Sequence
  Synthetic
atggtcttcacactcgaagatttcgttggggactggacccagacagccgcctacaacctggaccaagtccttgaacagggaggtgtgtccagtttgtttcagaatctcgccgtgtccgtaactccgatccaaaggattgtcctgagcggtgaaaatgccctgaagatcgacatccatgtcatcatcccgtatgaaggtctgagcgccgaccaaatggcccagatcgaaaaaatttttaaggtggtgtaccctgtggatgatcatcactttaaggtgatcctgcactatggcacactggtaatcgacggggttacgccgaacatgatcgactatttcggacggccgtatgaaggcatcgccgtgttcgacggcaaaaagatcactgtaacagggaccctgtggaacggcaacaaaattatcgacgagcgcctgatcaaccccgacggctccctgctgttccgagtaaccatcaacgtt

SEQ ID NO: 582 - protein, 159 aa, Artificial Sequence
  Synthetic
MVFTLEDFVGDWTQTAAYNLDQVLEQGGVSSLFQNLAVSVTPIQRIVLSGENALKIDIHVIIPYEGLSADQMAQIEKIFKVVYPVDDHHFKVILHYGTLVIDGVTPNMIDYFGRPYEGIAVFDGKKITVTGTLWNGNKIIDERLINPDGSLLFRVTINV

SEQ ID NO: 583 - DNA, 477 bp, Artificial Sequence
  Synthetic
atggtcttcacactcgaagatttcgttggggactgggtgcagacagccgcctacaacctggaccaagtccttgaacagggaggtgtgtccagtttgtttcagaatctcgccgtgtccgtaactccgatccaaaggattgtcctgagcggtgaaaatgccctgaagatcgacatccatgtcatcatcccgtatgaaggtctgagcgccgaccaaatggcccagatcgaaaaaatttttaaggtggtgtaccctgtggatgatcatcactttaaggtgatcctgcactatggcacactggtaatcgacggggttacgccgaacatgatcgactatttcggacggccgtatgaaggcatcgccgtgttcgacggcaaaaagatcactgtaacagggaccctgtggaacggcaacaaaattatcgacgagcgcctgatcaaccccgacggctccctgctgttccgagtaaccatcaacgtt

SEQ ID NO: 584 - protein, 159 aa, Artificial Sequence
  Synthetic
MVFTLEDFVGDWVQTAAYNLDQVLEQGGVSSLFQNLAVSVTPIQRIVLSGENALKIDIHVIIPYEGLSADQMAQIEKIFKVVYPVDDHHFKVILHYGTLVIDGVTPNMIDYFGRPYEGIAVFDGKKITVTGTLWNGNKIIDERLINPDGSLLFRVTINV

SEQ ID NO: 585 - DNA, 477 bp, Artificial Sequence
  Synthetic
atggtcttcacactcgaagatttcgttggggactggtggcagacagccgcctacaacctggaccaagtccttgaacagggaggtgtgtccagtttgtttcagaatctcgccgtgtccgtaactccgatccaaaggattgtcctgagcggtgaaaatgccctgaagatcgacatccatgtcatcatcccgtatgaaggtctgagcgccgaccaaatggcccagatcgaaaaaatttttaaggtggtgtaccctgtggatgatcatcactttaaggtgatcctgcactatggcacactggtaatcgacggggttacgccgaacatgatcgactatttcggacggccgtatgaaggcatcgccgtgttcgacggcaaaaagatcactgtaacagggaccctgtggaacggcaacaaaattatcgacgagcgcctgatcaaccccgacggctccctgctgttccgagtaaccatcaacgtt

SEQ ID NO: 586 - protein, 159 aa, Artificial Sequence
  Synthetic
MVFTLEDFVGDWWQTAAYNLDQVLEQGGVSSLFQNLAVSVTPIQRIVLSGENALKIDIHVIIPYEGLSADQMAQIEKIFKVVYPVDDHHFKVILHYGTLVIDGVTPNMIDYFGRPYEGIAVFDGKKITVTGTLWNGNKIIDERLINPDGSLLFRVTINV

SEQ ID NO: 587 - DNA, 477 bp, Artificial Sequence
  Synthetic
atggtcttcacactcgaagatttcgttggggactggtaccagacagccgcctacaacctggaccaagtccttgaacagggaggtgtgtccagtttgtttcagaatctcgccgtgtccgtaactccgatccaaaggattgtcctgagcggtgaaaatgccctgaagatcgacatccatgtcatcatcccgtatgaaggtctgagcgccgaccaaatggcccagatcgaaaaaatttttaaggtggtgtaccctgtggatgatcatcactttaaggtgatcctgcactatggcacactggtaatcgacggggttacgccgaacatgatcgactatttcggacggccgtatgaaggcatcgccgtgttcgacggcaaaaagatcactgtaacagggaccctgtggaacggcaacaaaattatcgacgagcgcctgatcaaccccgacggctccctgctgttccgagtaaccatcaacgtt

SEQ ID NO: 588 - protein, 159 aa, Artificial Sequence
  Synthetic
MVFTLEDFVGDWYQTAAYNLDQVLEQGGVSSLFQNLAVSVTPIQRIVLSGENALKIDIHVIIPYEGLSADQMAQIEKIFKVVYPVDDHHFKVILHYGTLVIDGVTPNMIDYFGRPYEGIAVFDGKKITVTGTLWNGNKIIDERLINPDGSLLFRVTINV

SEQ ID NO: 589 - DNA, 477 bp, Artificial Sequence
  Synthetic
atggtcttcacactcgaagatttcgttggggactggcgacagacagcctgctacaacctggaccaagtccttgaacagggaggtgtgtccagtttgtttcagaatctcgccgtgtccgtaactccgatccaaaggattgtcctgagcggtgaaaatgccctgaagatcgacatccatgtcatcatcccgtatgaaggtctgagcgccgaccaaatggcccagatcgaaaaaatttttaaggtggtgtaccctgtggatgatcatcactttaaggtgatcctgcactatggcacactggtaatcgacggggttacgccgaacatgatcgactatttcggacggccgtatgaaggcatcgccgtgttcgacggcaaaaagatcactgtaacagggaccctgtggaacggcaacaaaattatcgacgagcgcctgatcaaccccgacggctccctgctgttccgagtaaccatcaacgtt

SEQ ID NO: 590 - protein, 159 aa, Artificial Sequence
  Synthetic
MVFTLEDFVGDWRQTACYNLDQVLEQGGVSSLFQNLAVSVTPIQRIVLSGENALKIDIHVIIPYEGLSADQMAQIEKIFKVVYPVDDHHFKVILHYGTLVIDGVTPNMIDYFGRPYEGIAVFDGKKITVTGTLWNGNKIIDERLINPDGSLLFRVTINV

SEQ ID NO: 591 - DNA, 477 bp, Artificial Sequence
  Synthetic
atggtcttcacactcgaagatttcgttggggactggcgacagacagccgactacaacctggaccaagtccttgaacagggaggtgtgtccagtttgtttcagaatctcgccgtgtccgtaactccgatccaaaggattgtcctgagcggtgaaaatgccctgaagatcgacatccatgtcatcatcccgtatgaaggtctgagcgccgaccaaatggcccagatcgaaaaaatttttaaggtggtgtaccctgtggatgatcatcactttaaggtgatcctgcactatggcacactggtaatcgacggggttacgccgaacatgatcgactatttcggacggccgtatgaaggcatcgccgtgttcgacggcaaaaagatcactgtaacagggaccctgtggaacggcaacaaaattatcgacgagcgcctgatcaaccccgacggctccctgctgttccgagtaaccatcaacgtt

SEQ ID NO: 592 - protein, 159 aa, Artificial Sequence
  Synthetic
MVFTLEDFVGDWRQTADYNLDQVLEQGGVSSLFQNLAVSVTPIQRIVLSGENALKIDIHVIIPYEGLSADQMAQIEKIFKVVYPVDDHHFKVILHYGTLVIDGVTPNMIDYFGRPYEGIAVFDGKKITVTGTLWNGNKIIDERLINPDGSLLFRVTINV

SEQ ID NO: 593 - DNA, 477 bp, Artificial Sequence
  Synthetic
atggtcttcacactcgaagatttcgttggggactggcgacagacagccgagtacaacctggaccaagtccttgaacagggaggtgtgtccagtttgtttcagaatctcgccgtgtccgtaactccgatccaaaggattgtcctgagcggtgaaaatgccctgaagatcgacatccatgtcatcatcccgtatgaaggtctgagcgccgaccaaatggcccagatcgaaaaaatttttaaggtggtgtaccctgtggatgatcatcactttaaggtgatcctgcactatggcacactggtaatcgacggggttacgccgaacatgatcgactatttcggacggccgtatgaaggcatcgccgtgttcgacggcaaaaagatcactgtaacagggaccctgtggaacggcaacaaaattatcgacgagcgcctgatcaaccccgacggctccctgctgttccgagtaaccatcaacgtt

SEQ ID NO: 594 - protein, 159 aa, Artificial Sequence
  Synthetic
MVFTLEDFVGDWRQTAEYNLDQVLEQGGVSSLFQNLAVSVTPIQRIVLSGENALKIDIHVIIPYEGLSADQMAQIEKIFKVVYPVDDHHFKVILHYGTLVIDGVTPNMIDYFGRPYEGIAVFDGKKITVTGTLWNGNKIIDERLINPDGSLLFRVTINV

SEQ ID NO: 595 - DNA, 477 bp, Artificial Sequence
  Synthetic
atggtcttcacactcgaagatttcgttggggactggcgacagacagccttctacaacctggaccaagtccttgaacagggaggtgtgtccagtttgtttcagaatctcgccgtgtccgtaactccgatccaaaggattgtcctgagcggtgaaaatgccctgaagatcgacatccatgtcatcatcccgtatgaaggtctgagcgccgaccaaatggcccagatcgaaaaaatttttaaggtggtgtaccctgtggatgatcatcactttaaggtgatcctgcactatggcacactggtaatcgacggggttacgccgaacatgatcgactatttcggacggccgtatgaaggcatcgccgtgttcgacggcaaaaagatcactgtaacagggaccctgtggaacggcaacaaaattatcgacgagcgcctgatcaaccccgacggctccctgctgttccgagtaaccatcaacgtt

SEQ ID NO: 596 - protein, 159 aa, Artificial Sequence
  Synthetic
MVFTLEDFVGDWRQTAFYNLDQVLEQGGVSSLFQNLAVSVTPIQRIVLSGENALKIDIHVIIPYEGLSADQMAQIEKIFKVVYPVDDHHFKVILHYGTLVIDGVTPNMIDYFGRPYEGIAVFDGKKITVTGTLWNGNKIIDERLINPDGSLLFRVTINV

SEQ ID NO: 597 - DNA, 477 bp, Artificial Sequence; identical to SEQ ID NO: 541
  Synthetic

SEQ ID NO: 598 - protein, 159 aa, Artificial Sequence; identical to SEQ ID NO: 542
  Synthetic

SEQ ID NO: 599 - DNA, 477 bp, Artificial Sequence
  Synthetic
atggtcttcacactcgaagatttcgttggggactggcgacagacagcccactacaacctggaccaagtccttgaacagggaggtgtgtccagtttgtttcagaatctcgccgtgtccgtaactccgatccaaaggattgtcctgagcggtgaaaatgccctgaagatcgacatccatgtcatcatcccgtatgaaggtctgagcgccgaccaaatggcccagatcgaaaaaatttttaaggtggtgtaccctgtggatgatcatcactttaaggtgatcctgcactatggcacactggtaatcgacggggttacgccgaacatgatcgactatttcggacggccgtatgaaggcatcgccgtgttcgacggcaaaaagatcactgtaacagggaccctgtggaacggcaacaaaattatcgacgagcgcctgatcaaccccgacggctccctgctgttccgagtaaccatcaacgtt

SEQ ID NO: 600 - protein, 159 aa, Artificial Sequence
  Synthetic
MVFTLEDFVGDWRQTAHYNLDQVLEQGGVSSLFQNLAVSVTPIQRIVLSGENALKIDIHVIIPYEGLSADQMAQIEKIFKVVYPVDDHHFKVILHYGTLVIDGVTPNMIDYFGRPYEGIAVFDGKKITVTGTLWNGNKIIDERLINPDGSLLFRVTINV

SEQ ID NO: 601 - DNA, 477 bp, Artificial Sequence
  Synthetic
atggtcttcacactcgaagatttcgttggggactggcgacagacagccatctacaacctggaccaagtccttgaacagggaggtgtgtccagtttgtttcagaatctcgccgtgtccgtaactccgatccaaaggattgtcctgagcggtgaaaatgccctgaagatcgacatccatgtcatcatcccgtatgaaggtctgagcgccgaccaaatggcccagatcgaaaaaatttttaaggtggtgtaccctgtggatgatcatcactttaaggtgatcctgcactatggcacactggtaatcgacggggttacgccgaacatgatcgactatttcggacggccgtatgaaggcatcgccgtgttcgacggcaaaaagatcactgtaacagggaccctgtggaacggcaacaaaattatcgacgagcgcctgatcaaccccgacggctccctgctgttccgagtaaccatcaacgtt

SEQ ID NO: 602 - protein, 159 aa, Artificial Sequence
  Synthetic
MVFTLEDFVGDWRQTAIYNLDQVLEQGGVSSLFQNLAVSVTPIQRIVLSGENALKIDIHVIIPYEGLSADQMAQIEKIFKVVYPVDDHHFKVILHYGTLVIDGVTPNMIDYFGRPYEGIAVFDGKKITVTGTLWNGNKIIDERLINPDGSLLFRVTINV

SEQ ID NO: 603 - DNA, 477 bp, Artificial Sequence
  Synthetic
atggtcttcacactcgaagatttcgttggggactggcgacagacagccaagtacaacctggaccaagtccttgaacagggaggtgtgtccagtttgtttcagaatctcgccgtgtccgtaactccgatccaaaggattgtcctgagcggtgaaaatgccctgaagatcgacatccatgtcatcatcccgtatgaaggtctgagcgccgaccaaatggcccagatcgaaaaaatttttaaggtggtgtaccctgtggatgatcatcactttaaggtgatcctgcactatggcacactggtaatcgacggggttacgccgaacatgatcgactatttcggacggccgtatgaaggcatcgccgtgttcgacggcaaaaagatcactgtaacagggaccctgtggaacggcaacaaaattatcgacgagcgcctgatcaaccccgacggctccctgctgttccgagtaaccatcaacgtt

SEQ ID NO: 604 - protein, 159 aa, Artificial Sequence
  Synthetic
MVFTLEDFVGDWRQTAKYNLDQVLEQGGVSSLFQNLAVSVTPIQRIVLSGENALKIDIHVIIPYEGLSADQMAQIEKIFKVVYPVDDHHFKVILHYGTLVIDGVTPNMIDYFGRPYEGIAVFDGKKITVTGTLWNGNKIIDERLINPDGSLLFRVTINV

SEQ ID NO: 605 - DNA, 477 bp, Artificial Sequence
  Synthetic
atggtcttcacactcgaagatttcgttggggactggcgacagacagccctgtacaacctggaccaagtccttgaacagggaggtgtgtccagtttgtttcagaatctcgccgtgtccgtaactccgatccaaaggattgtcctgagcggtgaaaatgccctgaagatcgacatccatgtcatcatcccgtatgaaggtctgagcgccgaccaaatggcccagatcgaaaaaatttttaaggtggtgtaccctgtggatgatcatcactttaaggtgatcctgcactatggcacactggtaatcgacggggttacgccgaacatgatcgactatttcggacggccgtatgaaggcatcgccgtgttcgacggcaaaaagatcactgtaacagggaccctgtggaacggcaacaaaattatcgacgagcgcctgatcaaccccgacggctccctgctgttccgagtaaccatcaacgtt

SEQ ID NO: 606 - protein, 159 aa, Artificial Sequence
  Synthetic
MVFTLEDFVGDWRQTALYNLDQVLEQGGVSSLFQNLAVSVTPIQRIVLSGENALKIDIHVIIPYEGLSADQMAQIEKIFKVVYPVDDHHFKVILHYGTLVIDGVTPNMIDYFGRPYEGIAVFDGKKITVTGTLWNGNKIIDERLINPDGSLLFRVTINV

SEQ ID NO: 607 - DNA, 477 bp, Artificial Sequence
  Synthetic
atggtcttcacactcgaagatttcgttggggactggcgacagacagccatgtacaacctggaccaagtccttgaacagggaggtgtgtccagtttgtttcagaatctcgccgtgtccgtaactccgatccaaaggattgtcctgagcggtgaaaatgccctgaagatcgacatccatgtcatcatcccgtatgaaggtctgagcgccgaccaaatggcccagatcgaaaaaatttttaaggtggtgtaccctgtggatgatcatcactttaaggtgatcctgcactatggcacactggtaatcgacggggttacgccgaacatgatcgactatttcggacggccgtatgaaggcatcgccgtgttcgacggcaaaaagatcactgtaacagggaccctgtggaacggcaacaaaattatcgacgagcgcctgatcaaccccgacggctccctgctgttccgagtaaccatcaacgtt

SEQ ID NO: 608 - protein, 159 aa, Artificial Sequence
  Synthetic
MVFTLEDFVGDWRQTAMYNLDQVLEQGGVSSLFQNLAVSVTPIQRIVLSGENALKIDIHVIIPYEGLSADQMAQIEKIFKVVYPVDDHHFKVILHYGTLVIDGVTPNMIDYFGRPYEGIAVFDGKKITVTGTLWNGNKIIDERLINPDGSLLFRVTINV

SEQ ID NO: 609 - DNA, 477 bp, Artificial Sequence
  Synthetic
atggtcttcacactcgaagatttcgttggggactggcgacagacagccaactacaacctggaccaagtccttgaacagggaggtgtgtccagtttgtttcagaatctcgccgtgtccgtaactccgatccaaaggattgtcctgagcggtgaaaatgccctgaagatcgacatccatgtcatcatcccgtatgaaggtctgagcgccgaccaaatggcccagatcgaaaaaatttttaaggtggtgtaccctgtggatgatcatcactttaaggtgatcctgcactatggcacactggtaatcgacggggttacgccgaacatgatcgactatttcggacggccgtatgaaggcatcgccgtgttcgacggcaaaaagatcactgtaacagggaccctgtggaacggcaacaaaattatcgacgagcgcctgatcaaccccgacggctccctgctgttccgagtaaccatcaacgtt

SEQ ID NO: 610 - protein, 159 aa, Artificial Sequence
  Synthetic
MVFTLEDFVGDWRQTANYNLDQVLEQGGVSSLFQNLAVSVTPIQRIVLSGENALKIDIHVIIPYEGLSADQMAQIEKIFKVVYPVDDHHFKVILHYGTLVIDGVTPNMIDYFGRPYEGIAVFDGKKITVTGTLWNGNKIIDERLINPDGSLLFRVTINV

SEQ ID NO: 611 - DNA, 477 bp, Artificial Sequence
  Synthetic
atggtcttcacactcgaagatttcgttggggactggcgacagacagccccctacaacctggaccaagtccttgaacagggaggtgtgtccagtttgtttcagaatctcgccgtgtccgtaactccgatccaaaggattgtcctgagcggtgaaaatgccctgaagatcgacatccatgtcatcatcccgtatgaaggtctgagcgccgaccaaatggcccagatcgaaaaaatttttaaggtggtgtaccctgtggatgatcatcactttaaggtgatcctgcactatggcacactggtaatcgacggggttacgccgaacatgatcgactatttcggacggccgtatgaaggcatcgccgtgttcgacggcaaaaagatcactgtaacagggaccctgtggaacggcaacaaaattatcgacgagcgcctgatcaaccccgacggctccctgctgttccgagtaaccatcaacgtt

SEQ ID NO: 612 - protein, 159 aa, Artificial Sequence
  Synthetic
MVFTLEDFVGDWRQTAPYNLDQVLEQGGVSSLFQNLAVSVTPIQRIVLSGENALKIDIHVIIPYEGLSADQMAQIEKIFKVVYPVDDHHFKVILHYGTLVIDGVTPNMIDYFGRPYEGIAVFDGKKITVTGTLWNGNKIIDERLINPDGSLLFRVTINV

SEQ ID NO: 613 - DNA, 477 bp, Artificial Sequence
  Synthetic
atggtcttcacactcgaagatttcgttggggactggcgacagacagcccagtacaacctggaccaagtccttgaacagggaggtgtgtccagtttgtttcagaatctcgccgtgtccgtaactccgatccaaaggattgtcctgagcggtgaaaatgccctgaagatcgacatccatgtcatcatcccgtatgaaggtctgagcgccgaccaaatggcccagatcgaaaaaatttttaaggtggtgtaccctgtggatgatcatcactttaaggtgatcctgcactatggcacactggtaatcgacggggttacgccgaacatgatcgactatttcggacggccgtatgaaggcatcgccgtgttcgacggcaaaaagatcactgtaacagggaccctgtggaacggcaacaaaattatcgacgagcgcctgatcaaccccgacggctccctgctgttccgagtaaccatcaacgtt

SEQ ID NO: 614 - protein, 159 aa, Artificial Sequence
  Synthetic
MVFTLEDFVGDWRQTAQYNLDQVLEQGGVSSLFQNLAVSVTPIQRIVLSGENALKIDIHVIIPYEGLSADQMAQIEKIFKVVYPVDDHHFKVILHYGTLVIDGVTPNMIDYFGRPYEGIAVFDGKKITVTGTLWNGNKIIDERLINPDGSLLFRVTINV

SEQ ID NO: 615 - DNA, 477 bp, Artificial Sequence
  Synthetic
atggtcttcacactcgaagatttcgttggggactggcgacagacagcccggtacaacctggaccaagtccttgaacagggaggtgtgtccagtttgtttcagaatctcgccgtgtccgtaactccgatccaaaggattgtcctgagcggtgaaaatgccctgaagatcgacatccatgtcatcatcccgtatgaaggtctgagcgccgaccaaatggcccagatcgaaaaaatttttaaggtggtgtaccctgtggatgatcatcactttaaggtgatcctgcactatggcacactggtaatcgacggggttacgccgaacatgatcgactatttcggacggccgtatgaaggcatcgccgtgttcgacggcaaaaagatcactgtaacagggaccctgtggaacggcaacaaaattatcgacgagcgcctgatcaaccccgacggctccctgctgttccgagtaaccatcaacgtt

SEQ ID NO: 616 - protein, 159 aa, Artificial Sequence
  Synthetic
MVFTLEDFVGDWRQTARYNLDQVLEQGGVSSLFQNLAVSVTPIQRIVLSGENALKIDIHVIIPYEGLSADQMAQIEKIFKVVYPVDDHHFKVILHYGTLVIDGVTPNMIDYFGRPYEGIAVFDGKKITVTGTLWNGNKIIDERLINPDGSLLFRVTINV

SEQ ID NO: 617 - DNA, 477 bp, Artificial Sequence
  Synthetic
atggtcttcacactcgaagatttcgttggggactggcgacagacagccagctacaacctggaccaagtccttgaacagggaggtgtgtccagtttgtttcagaatctcgccgtgtccgtaactccgatccaaaggattgtcctgagcggtgaaaatgccctgaagatcgacatccatgtcatcatcccgtatgaaggtctgagcgccgaccaaatggcccagatcgaaaaaatttttaaggtggtgtaccctgtggatgatcatcactttaaggtgatcctgcactatggcacactggtaatcgacggggttacgccgaacatgatcgactatttcggacggccgtatgaaggcatcgccgtgttcgacggcaaaaagatcactgtaacagggaccctgtggaacggcaacaaaattatcgacgagcgcctgatcaaccccgacggctccctgctgttccgagtaaccatcaacgtt

SEQ ID NO: 618 - protein, 159 aa, Artificial Sequence
  Synthetic
MVFTLEDFVGDWRQTASYNLDQVLEQGGVSSLFQNLAVSVTPIQRIVLSGENALKIDIHVIIPYEGLSADQMAQIEKIFKVVYPVDDHHFKVILHYGTLVIDGVTPNMIDYFGRPYEGIAVFDGKKITVTGTLWNGNKIIDERLINPDGSLLFRVTINV

SEQ ID NO: 619 - DNA, 477 bp, Artificial Sequence
  Synthetic
atggtcttcacactcgaagatttcgttggggactggcgacagacagccacctacaacctggaccaagtccttgaacagggaggtgtgtccagtttgtttcagaatctcgccgtgtccgtaactccgatccaaaggattgtcctgagcggtgaaaatgccctgaagatcgacatccatgtcatcatcccgtatgaaggtctgagcgccgaccaaatggcccagatcgaaaaaatttttaaggtggtgtaccctgtggatgatcatcactttaaggtgatcctgcactatggcacactggtaatcgacggggttacgccgaacatgatcgactatttcggacggccgtatgaaggcatcgccgtgttcgacggcaaaaagatcactgtaacagggaccctgtggaacggcaacaaaattatcgacgagcgcctgatcaaccccgacggctccctgctgttccgagtaaccatcaacgtt

SEQ ID NO: 620 - protein, 159 aa, Artificial Sequence
  Synthetic
MVFTLEDFVGDWRQTATYNLDQVLEQGGVSSLFQNLAVSVTPIQRIVLSGENALKIDIHVIIPYEGLSADQMAQIEKIFKVVYPVDDHHFKVILHYGTLVIDGVTPNMIDYFGRPYEGIAVFDGKKITVTGTLWNGNKIIDERLINPDGSLLFRVTINV

SEQ ID NO: 621 - DNA, 477 bp, Artificial Sequence
  Synthetic
atggtcttcacactcgaagatttcgttggggactggcgacagacagccgtgtacaacctggaccaagtccttgaacagggaggtgtgtccagtttgtttcagaatctcgccgtgtccgtaactccgatccaaaggattgtcctgagcggtgaaaatgccctgaagatcgacatccatgtcatcatcccgtatgaaggtctgagcgccgaccaaatggcccagatcgaaaaaatttttaaggtggtgtaccctgtggatgatcatcactttaaggtgatcctgcactatggcacactggtaatcgacggggttacgccgaacatgatcgactatttcggacggccgtatgaaggcatcgccgtgttcgacggcaaaaagatcactgtaacagggaccctgtggaacggcaacaaaattatcgacgagcgcctgatcaaccccgacggctccctgctgttccgagtaaccatcaacgtt

SEQ ID NO: 622 - protein, 159 aa, Artificial Sequence
  Synthetic
MVFTLEDFVGDWRQTAVYNLDQVLEQGGVSSLFQNLAVSVTPIQRIVLSGENALKIDIHVIIPYEGLSADQMAQIEKIFKVVYPVDDHHFKVILHYGTLVIDGVTPNMIDYFGRPYEGIAVFDGKKITVTGTLWNGNKIIDERLINPDGSLLFRVTINV

SEQ ID NO: 623 - DNA, 477 bp, Artificial Sequence
  Synthetic
atggtcttcacactcgaagatttcgttggggactggcgacagacagcctggtacaacctggaccaagtccttgaacagggaggtgtgtccagtttgtttcagaatctcgccgtgtccgtaactccgatccaaaggattgtcctgagcggtgaaaatgccctgaagatcgacatccatgtcatcatcccgtatgaaggtctgagcgccgaccaaatggcccagatcgaaaaaatttttaaggtggtgtaccctgtggatgatcatcactttaaggtgatcctgcactatggcacactggtaatcgacggggttacgccgaacatgatcgactatttcggacggccgtatgaaggcatcgccgtgttcgacggcaaaaagatcactgtaacagggaccctgtggaacggcaacaaaattatcgacgagcgcctgatcaaccccgacggctccctgctgttccgagtaaccatcaacgtt

SEQ ID NO: 624 - protein, 159 aa, Artificial Sequence
  Synthetic
MVFTLEDFVGDWRQTAWYNLDQVLEQGGVSSLFQNLAVSVTPIQRIVLSGENALKIDIHVIIPYEGLSADQMAQIEKIFKVVYPVDDHHFKVILHYGTLVIDGVTPNMIDYFGRPYEGIAVFDGKKITVTGTLWNGNKIIDERLINPDGSLLFRVTINV

SEQ ID NO: 625 - DNA, 477 bp, Artificial Sequence
  Synthetic
atggtcttcacactcgaagatttcgttggggactggcgacagacagcctactacaacctggaccaagtccttgaacagggaggtgtgtccagtttgtttcagaatctcgccgtgtccgtaactccgatccaaaggattgtcctgagcggtgaaaatgccctgaagatcgacatccatgtcatcatcccgtatgaaggtctgagcgccgaccaaatggcccagatcgaaaaaatttttaaggtggtgtaccctgtggatgatcatcactttaaggtgatcctgcactatggcacactggtaatcgacggggttacgccgaacatgatcgactatttcggacggccgtatgaaggcatcgccgtgttcgacggcaaaaagatcactgtaacagggaccctgtggaacggcaacaaaattatcgacgagcgcctgatcaaccccgacggctccctgctgttccgagtaaccatcaacgtt

SEQ ID NO: 626 - protein, 159 aa, Artificial Sequence
  Synthetic
MVFTLEDFVGDWRQTAYYNLDQVLEQGGVSSLFQNLAVSVTPIQRIVLSGENALKIDIHVIIPYEGLSADQMAQIEKIFKVVYPVDDHHFKVILHYGTLVIDGVTPNMIDYFGRPYEGIAVFDGKKITVTGTLWNGNKIIDERLINPDGSLLFRVTINV

SEQ ID NO: 627 - DNA, 477 bp, Artificial Sequence
  Synthetic
atggtcttcacactcgaagatttcgttggggactggcgacagacagccgcctacaacgccgaccaagtccttgaacagggaggtgtgtccagtttgtttcagaatctcgccgtgtccgtaactccgatccaaaggattgtcctgagcggtgaaaatgccctgaagatcgacatccatgtcatcatcccgtatgaaggtctgagcgccgaccaaatggcccagatcgaaaaaatttttaaggtggtgtaccctgtggatgatcatcactttaaggtgatcctgcactatggcacactggtaatcgacggggttacgccgaacatgatcgactatttcggacggccgtatgaaggcatcgccgtgttcgacggcaaaaagatcactgtaacagggaccctgtggaacggcaacaaaattatcgacgagcgcctgatcaaccccgacggctccctgctgttccgagtaaccatcaacgtt

SEQ ID NO: 628 - protein, 159 aa, Artificial Sequence
  Synthetic
MVFTLEDFVGDWRQTAAYNADQVLEQGGVSSLFQNLAVSVTPIQRIVLSGENALKIDIHVIIPYEGLSADQMAQIEKIFKVVYPVDDHHFKVILHYGTLVIDGVTPNMIDYFGRPYEGIAVFDGKKITVTGTLWNGNKIIDERLINPDGSLLFRVTINV

SEQ ID NO: 629 - DNA, 477 bp, Artificial Sequence
  Synthetic
atggtcttcacactcgaagatttcgttggggactggcgacagacagccgcctacaactgcgaccaagtccttgaacagggaggtgtgtccagtttgtttcagaatctcgccgtgtccgtaactccgatccaaaggattgtcctgagcggtgaaaatgccctgaagatcgacatccatgtcatcatcccgtatgaaggtctgagcgccgaccaaatggcccagatcgaaaaaatttttaaggtggtgtaccctgtggatgatcatcactttaaggtgatcctgcactatggcacactggtaatcgacggggttacgccgaacatgatcgactatttcggacggccgtatgaaggcatcgccgtgttcgacggcaaaaagatcactgtaacagggaccctgtggaacggcaacaaaattatcgacgagcgcctgatcaaccccgacggctccctgctgttccgagtaaccatcaacgtt

SEQ ID NO: 630 - protein, 159 aa, Artificial Sequence
  Synthetic
MVFTLEDFVGDWRQTAAYNCDQVLEQGGVSSLFQNLAVSVTPIQRIVLSGENALKIDIHVIIPYEGLSADQMAQIEKIFKVVYPVDDHHFKVILHYGTLVIDGVTPNMIDYFGRPYEGIAVFDGKKITVTGTLWNGNKIIDERLINPDGSLLFRVTINV

SEQ ID NO: 631 - DNA, 477 bp, Artificial Sequence
  Synthetic
atggtcttcacactcgaagatttcgttggggactggcgacagacagccgcctacaacgacgaccaagtccttgaacagggaggtgtgtccagtttgtttcagaatctcgccgtgtccgtaactccgatccaaaggattgtcctgagcggtgaaaatgccctgaagatcgacatccatgtcatcatcccgtatgaaggtctgagcgccgaccaaatggcccagatcgaaaaaatttttaaggtggtgtaccctgtggatgatcatcactttaaggtgatcctgcactatggcacactggtaatcgacggggttacgccgaacatgatcgactatttcggacggccgtatgaaggcatcgccgtgttcgacggcaaaaagatcactgtaacagggaccctgtggaacggcaacaaaattatcgacgagcgcctgatcaaccccgacggctccctgctgttccgagtaaccatcaacgtt

SEQ ID NO: 632 - protein, 159 aa, Artificial Sequence
  Synthetic
MVFTLEDFVGDWRQTAAYNDDQVLEQGGVSSLFQNLAVSVTPIQRIVLSGENALKIDIHVIIPYEGLSADQMAQIEKIFKVVYPVDDHHFKVILHYGTLVIDGVTPNMIDYFGRPYEGIAVFDGKKITVTGTLWNGNKIIDERLINPDGSLLFRVTINV

SEQ ID NO: 633 - DNA, 477 bp, Artificial Sequence
  Synthetic
atggtcttcacactcgaagatttcgttggggactggcgacagacagccgcctacaacgaggaccaagtccttgaacagggaggtgtgtccagtttgtttcagaatctcgccgtgtccgtaactccgatccaaaggattgtcctgagcggtgaaaatgccctgaagatcgacatccatgtcatcatcccgtatgaaggtctgagcgccgaccaaatggcccagatcgaaaaaatttttaaggtggtgtaccctgtggatgatcatcactttaaggtgatcctgcactatggcacactggtaatcgacggggttacgccgaacatgatcgactatttcggacggccgtatgaaggcatcgccgtgttcgacggcaaaaagatcactgtaacagggaccctgtggaacggcaacaaaattatcgacgagcgcctgatcaaccccgacggctccctgctgttccgagtaaccatcaacgtt

SEQ ID NO: 634 - protein, 159 aa, Artificial Sequence
  Synthetic
MVFTLEDFVGDWRQTAAYNEDQVLEQGGVSSLFQNLAVSVTPIQRIVLSGENALKIDIHVIIPYEGLSADQMAQIEKIFKVVYPVDDHHFKVILHYGTLVIDGVTPNMIDYFGRPYEGIAVFDGKKITVTGTLWNGNKIIDERLINPDGSLLFRVTINV

SEQ ID NO: 635 - DNA, 477 bp, Artificial Sequence
  Synthetic
atggtcttcacactcgaagatttcgttggggactggcgacagacagccgcctacaacttcgaccaagtccttgaacagggaggtgtgtccagtttgtttcagaatctcgccgtgtccgtaactccgatccaaaggattgtcctgagcggtgaaaatgccctgaagatcgacatccatgtcatcatcccgtatgaaggtctgagcgccgaccaaatggcccagatcgaaaaaatttttaaggtggtgtaccctgtggatgatcatcactttaaggtgatcctgcactatggcacactggtaatcgacggggttacgccgaacatgatcgactatttcggacggccgtatgaaggcatcgccgtgttcgacggcaaaaagatcactgtaacagggaccctgtggaacggcaacaaaattatcgacgagcgcctgatcaaccccgacggctccctgctgttccgagtaaccatcaacgtt

SEQ ID NO: 636 - protein, 159 aa, Artificial Sequence
  Synthetic
MVFTLEDFVGDWRQTAAYNFDQVLEQGGVSSLFQNLAVSVTPIQRIVLSGENALKIDIHVIIPYEGLSADQMAQIEKIFKVVYPVDDHHFKVILHYGTLVIDGVTPNMIDYFGRPYEGIAVFDGKKITVTGTLWNGNKIIDERLINPDGSLLFRVTINV

SEQ ID NO: 637 - DNA, 477 bp, Artificial Sequence
  Synthetic
atggtcttcacactcgaagatttcgttggggactggcgacagacagccgcctacaacggcgaccaagtccttgaacagggaggtgtgtccagtttgtttcagaatctcgccgtgtccgtaactccgatccaaaggattgtcctgagcggtgaaaatgccctgaagatcgacatccatgtcatcatcccgtatgaaggtctgagcgccgaccaaatggcccagatcgaaaaaatttttaaggtggtgtaccctgtggatgatcatcactttaaggtgatcctgcactatggcacactggtaatcgacggggttacgccgaacatgatcgactatttcggacggccgtatgaaggcatcgccgtgttcgacggcaaaaagatcactgtaacagggaccctgtggaacggcaacaaaattatcgacgagcgcctgatcaaccccgacggctccctgctgttccgagtaaccatcaacgtt

SEQ ID NO: 638 - protein, 159 aa, Artificial Sequence
  Synthetic
MVFTLEDFVGDWRQTAAYNGDQVLEQGGVSSLFQNLAVSVTPIQRIVLSGENALKIDIHVIIPYEGLSADQMAQIEKIFKVVYPVDDHHFKVILHYGTLVIDGVTPNMIDYFGRPYEGIAVFDGKKITVTGTLWNGNKIIDERLINPDGSLLFRVTINV

SEQ ID NO: 639 - DNA, 477 bp, Artificial Sequence
  Synthetic
atggtcttcacactcgaagatttcgttggggactggcgacagacagccgcctacaaccacgaccaagtccttgaacagggaggtgtgtccagtttgtttcagaatctcgccgtgtccgtaactccgatccaaaggattgtcctgagcggtgaaaatgccctgaagatcgacatccatgtcatcatcccgtatgaaggtctgagcgccgaccaaatggcccagatcgaaaaaatttttaaggtggtgtaccctgtggatgatcatcactttaaggtgatcctgcactatggcacactggtaatcgacggggttacgccgaacatgatcgactatttcggacggccgtatgaaggcatcgccgtgttcgacggcaaaaagatcactgtaacagggaccctgtggaacggcaacaaaattatcgacgagcgcctgatcaaccccgacggctccctgctgttccgagtaaccatcaacgtt

SEQ ID NO: 640 - protein, 159 aa, Artificial Sequence
  Synthetic
MVFTLEDFVGDWRQTAAYNHDQVLEQGGVSSLFQNLAVSVTPIQRIVLSGENALKIDIHVIIPYEGLSADQMAQIEKIFKVVYPVDDHHFKVILHYGTLVIDGVTPNMIDYFGRPYEGIAVFDGKKITVTGTLWNGNKIIDERLINPDGSLLFRVTINV

SEQ ID NO: 641 - DNA, 477 bp, Artificial Sequence
  Synthetic
atggtcttcacactcgaagatttcgttggggactggcgacagacagccgcctacaacatcgaccaagtccttgaacagggaggtgtgtccagtttgtttcagaatctcgccgtgtccgtaactccgatccaaaggattgtcctgagcggtgaaaatgccctgaagatcgacatccatgtcatcatcccgtatgaaggtctgagcgccgaccaaatggcccagatcgaaaaaatttttaaggtggtgtaccctgtggatgatcatcactttaaggtgatcctgcactatggcacactggtaatcgacggggttacgccgaacatgatcgactatttcggacggccgtatgaaggcatcgccgtgttcgacggcaaaaagatcactgtaacagggaccctgtggaacggcaacaaaattatcgacgagcgcctgatcaaccccgacggctccctgctgttccgagtaaccatcaacgtt

SEQ ID NO: 642 - protein, 159 aa, Artificial Sequence
  Synthetic
MVFTLEDFVGDWRQTAAYNIDQVLEQGGVSSLFQNLAVSVTPIQRIVLSGENALKIDIHVIIPYEGLSADQMAQIEKIFKVVYPVDDHHFKVILHYGTLVIDGVTPNMIDYFGRPYEGIAVFDGKKITVTGTLWNGNKIIDERLINPDGSLLFRVTINV

SEQ ID NO: 643 - DNA, 477 bp, Artificial Sequence
  Synthetic
atggtcttcacactcgaagatttcgttggggactggcgacagacagccgcctacaacaaggaccaagtccttgaacagggaggtgtgtccagtttgtttcagaatctcgccgtgtccgtaactccgatccaaaggattgtcctgagcggtgaaaatgccctgaagatcgacatccatgtcatcatcccgtatgaaggtctgagcgccgaccaaatggcccagatcgaaaaaatttttaaggtggtgtaccctgtggatgatcatcactttaaggtgatcctgcactatggcacactggtaatcgacggggttacgccgaacatgatcgactatttcggacggccgtatgaaggcatcgccgtgttcgacggcaaaaagatcactgtaacagggaccctgtggaacggcaacaaaattatcgacgagcgcctgatcaaccccgacggctccctgctgttccgagtaaccatcaacgtt

SEQ ID NO: 644 - protein, 159 aa, Artificial Sequence
  Synthetic
MVFTLEDFVGDWRQTAAYNKDQVLEQGGVSSLFQNLAVSVTPIQRIVLSGENALKIDIHVIIPYEGLSADQMAQIEKIFKVVYPVDDHHFKVILHYGTLVIDGVTPNMIDYFGRPYEGIAVFDGKKITVTGTLWNGNKIIDERLINPDGSLLFRVTINV

SEQ ID NO: 645 - DNA, 477 bp, Artificial Sequence
  Synthetic
atggtcttcacactcgaagatttcgttggggactggcgacagacagccgcctacaacatggaccaagtccttgaacagggaggtgtgtccagtttgtttcagaatctcgccgtgtccgtaactccgatccaaaggattgtcctgagcggtgaaaatgccctgaagatcgacatccatgtcatcatcccgtatgaaggtctgagcgccgaccaaatggcccagatcgaaaaaatttttaaggtggtgtaccctgtggatgatcatcactttaaggtgatcctgcactatggcacactggtaatcgacggggttacgccgaacatgatcgactatttcggacggccgtatgaaggcatcgccgtgttcgacggcaaaaagatcactgtaacagggaccctgtggaacggcaacaaaattatcgacgagcgcctgatcaaccccgacggctccctgctgttccgagtaaccatcaacgtt

SEQ ID NO: 646 - protein, 159 aa, Artificial Sequence
  Synthetic
MVFTLEDFVGDWRQTAAYNMDQVLEQGGVSSLFQNLAVSVTPIQRIVLSGENALKIDIHVIIPYEGLSADQMAQIEKIFKVVYPVDDHHFKVILHYGTLVIDGVTPNMIDYFGRPYEGIAVFDGKKITVTGTLWNGNKIIDERLINPDGSLLFRVTINV

SEQ ID NO: 647 - DNA, 477 bp, Artificial Sequence
  Synthetic
atggtcttcacactcgaagatttcgttggggactggcgacagacagccgcctacaacaacgaccaagtccttgaacagggaggtgtgtccagtttgtttcagaatctcgccgtgtccgtaactccgatccaaaggattgtcctgagcggtgaaaatgccctgaagatcgacatccatgtcatcatcccgtatgaaggtctgagcgccgaccaaatggcccagatcgaaaaaatttttaaggtggtgtaccctgtggatgatcatcactttaaggtgatcctgcactatggcacactggtaatcgacggggttacgccgaacatgatcgactatttcggacggccgtatgaaggcatcgccgtgttcgacggcaaaaagatcactgtaacagggaccctgtggaacggcaacaaaattatcgacgagcgcctgatcaaccccgacggctccctgctgttccgagtaaccatcaacgtt

SEQ ID NO: 648 - protein, 159 aa, Artificial Sequence
  Synthetic
MVFTLEDFVGDWRQTAAYNNDQVLEQGGVSSLFQNLAVSVTPIQRIVLSGENALKIDIHVIIPYEGLSADQMAQIEKIFKVVYPVDDHHFKVILHYGTLVIDGVTPNMIDYFGRPYEGIAVFDGKKITVTGTLWNGNKIIDERLINPDGSLLFRVTINV

SEQ ID NO: 649 - DNA, 477 bp, Artificial Sequence
  Synthetic
atggtcttcacactcgaagatttcgttggggactggcgacagacagccgcctacaaccccgaccaagtccttgaacagggaggtgtgtccagtttgtttcagaatctcgccgtgtccgtaactccgatccaaaggattgtcctgagcggtgaaaatgccctgaagatcgacatccatgtcatcatcccgtatgaaggtctgagcgccgaccaaatggcccagatcgaaaaaatttttaaggtggtgtaccctgtggatgatcatcactttaaggtgatcctgcactatggcacactggtaatcgacggggttacgccgaacatgatcgactatttcggacggccgtatgaaggcatcgccgtgttcgacggcaaaaagatcactgtaacagggaccctgtggaacggcaacaaaattatcgacgagcgcctgatcaaccccgacggctccctgctgttccgagtaaccatcaacgtt

SEQ ID NO: 650 - protein, 159 aa, Artificial Sequence
  Synthetic
MVFTLEDFVGDWRQTAAYNPDQVLEQGGVSSLFQNLAVSVTPIQRIVLSGENALKIDIHVIIPYEGLSADQMAQIEKIFKVVYPVDDHHFKVILHYGTLVIDGVTPNMIDYFGRPYEGIAVFDGKKITVTGTLWNGNKIIDERLINPDGSLLFRVTINV

SEQ ID NO: 651 - DNA, 477 bp, Artificial Sequence
  Synthetic
atggtcttcacactcgaagatttcgttggggactggcgacagacagccgcctacaaccaggaccaagtccttgaacagggaggtgtgtccagtttgtttcagaatctcgccgtgtccgtaactccgatccaaaggattgtcctgagcggtgaaaatgccctgaagatcgacatccatgtcatcatcccgtatgaaggtctgagcgccgaccaaatggcccagatcgaaaaaatttttaaggtggtgtaccctgtggatgatcatcactttaaggtgatcctgcactatggcacactggtaatcgacggggttacgccgaacatgatcgactatttcggacggccgtatgaaggcatcgccgtgttcgacggcaaaaagatcactgtaacagggaccctgtggaacggcaacaaaattatcgacgagcgcctgatcaaccccgacggctccctgctgttccgagtaaccatcaacgtt

SEQ ID NO: 652 - protein, 159 aa, Artificial Sequence
  Synthetic
MVFTLEDFVGDWRQTAAYNQDQVLEQGGVSSLFQNLAVSVTPIQRIVLSGENALKIDIHVIIPYEGLSADQMAQIEKIFKVVYPVDDHHFKVILHYGTLVIDGVTPNMIDYFGRPYEGIAVFDGKKITVTGTLWNGNKIIDERLINPDGSLLFRVTINV

SEQ ID NO: 653 - DNA, 477 bp, Artificial Sequence
  Synthetic
atggtcttcacactcgaagatttcgttggggactggcgacagacagccgcctacaaccgggaccaagtccttgaacagggaggtgtgtccagtttgtttcagaatctcgccgtgtccgtaactccgatccaaaggattgtcctgagcggtgaaaatgccctgaagatcgacatccatgtcatcatcccgtatgaaggtctgagcgccgaccaaatggcccagatcgaaaaaatttttaaggtggtgtaccctgtggatgatcatcactttaaggtgatcctgcactatggcacactggtaatcgacggggttacgccgaacatgatcgactatttcggacggccgtatgaaggcatcgccgtgttcgacggcaaaaagatcactgtaacagggaccctgtggaacggcaacaaaattatcgacgagcgcctgatcaaccccgacggctccctgctgttccgagtaaccatcaacgtt

SEQ ID NO: 654 - protein, 159 aa, Artificial Sequence
  Synthetic
MVFTLEDFVGDWRQTAAYNRDQVLEQGGVSSLFQNLAVSVTPIQRIVLSGENALKIDIHVIIPYEGLSADQMAQIEKIFKVVYPVDDHHFKVILHYGTLVIDGVTPNMIDYFGRPYEGIAVFDGKKITVTGTLWNGNKIIDERLINPDGSLLFRVTINV

SEQ ID NO: 655 - DNA, 477 bp, Artificial Sequence
  Synthetic
atggtcttcacactcgaagatttcgttggggactggcgacagacagccgcctacaacagcgaccaagtccttgaacagggaggtgtgtccagtttgtttcagaatctcgccgtgtccgtaactccgatccaaaggattgtcctgagcggtgaaaatgccctgaagatcgacatccatgtcatcatcccgtatgaaggtctgagcgccgaccaaatggcccagatcgaaaaaatttttaaggtggtgtaccctgtggatgatcatcactttaaggtgatcctgcactatggcacactggtaatcgacggggttacgccgaacatgatcgactatttcggacggccgtatgaaggcatcgccgtgttcgacggcaaaaagatcactgtaacagggaccctgtggaacggcaacaaaattatcgacgagcgcctgatcaaccccgacggctccctgctgttccgagtaaccatcaacgtt

SEQ ID NO: 656 - protein, 159 aa, Artificial Sequence
  Synthetic
MVFTLEDFVGDWRQTAAYNSDQVLEQGGVSSLFQNLAVSVTPIQRIVLSGENALKIDIHVIIPYEGLSADQMAQIEKIFKVVYPVDDHHFKVILHYGTLVIDGVTPNMIDYFGRPYEGIAVFDGKKITVTGTLWNGNKIIDERLINPDGSLLFRVTINV

SEQ ID NO: 657 - DNA, 477 bp, Artificial Sequence
  Synthetic
atggtcttcacactcgaagatttcgttggggactggcgacagacagccgcctacaacaccgaccaagtccttgaacagggaggtgtgtccagtttgtttcagaatctcgccgtgtccgtaactccgatccaaaggattgtcctgagcggtgaaaatgccctgaagatcgacatccatgtcatcatcccgtatgaaggtctgagcgccgaccaaatggcccagatcgaaaaaatttttaaggtggtgtaccctgtggatgatcatcactttaaggtgatcctgcactatggcacactggtaatcgacggggttacgccgaacatgatcgactatttcggacggccgtatgaaggcatcgccgtgttcgacggcaaaaagatcactgtaacagggaccctgtggaacggcaacaaaattatcgacgagcgcctgatcaaccccgacggctccctgctgttccgagtaaccatcaacgtt

SEQ ID NO: 658 - protein, 159 aa, Artificial Sequence
  Synthetic
MVFTLEDFVGDWRQTAAYNTDQVLEQGGVSSLFQNLAVSVTPIQRIVLSGENALKIDIHVIIPYEGLSADQMAQIEKIFKVVYPVDDHHFKVILHYGTLVIDGVTPNMIDYFGRPYEGIAVFDGKKITVTGTLWNGNKIIDERLINPDGSLLFRVTINV

SEQ ID NO: 659 - DNA, 477 bp, Artificial Sequence
  Synthetic
atggtcttcacactcgaagatttcgttggggactggcgacagacagccgcctacaacgtggaccaagtccttgaacagggaggtgtgtccagtttgtttcagaatctcgccgtgtccgtaactccgatccaaaggattgtcctgagcggtgaaaatgccctgaagatcgacatccatgtcatcatcccgtatgaaggtctgagcgccgaccaaatggcccagatcgaaaaaatttttaaggtggtgtaccctgtggatgatcatcactttaaggtgatcctgcactatggcacactggtaatcgacggggttacgccgaacatgatcgactatttcggacggccgtatgaaggcatcgccgtgttcgacggcaaaaagatcactgtaacagggaccctgtggaacggcaacaaaattatcgacgagcgcctgatcaaccccgacggctccctgctgttccgagtaaccatcaacgtt

SEQ ID NO: 660 - protein, 159 aa, Artificial Sequence
  Synthetic
MVFTLEDFVGDWRQTAAYNVDQVLEQGGVSSLFQNLAVSVTPIQRIVLSGENALKIDIHVIIPYEGLSADQMAQIEKIFKVVYPVDDHHFKVILHYGTLVIDGVTPNMIDYFGRPYEGIAVFDGKKITVTGTLWNGNKIIDERLINPDGSLLFRVTINV

SEQ ID NO: 661 - DNA, 477 bp, Artificial Sequence
  Synthetic
atggtcttcacactcgaagatttcgttggggactggcgacagacagccgcctacaactgggaccaagtccttgaacagggaggtgtgtccagtttgtttcagaatctcgccgtgtccgtaactccgatccaaaggattgtcctgagcggtgaaaatgccctgaagatcgacatccatgtcatcatcccgtatgaaggtctgagcgccgaccaaatggcccagatcgaaaaaatttttaaggtggtgtaccctgtggatgatcatcactttaaggtgatcctgcactatggcacactggtaatcgacggggttacgccgaacatgatcgactatttcggacggccgtatgaaggcatcgccgtgttcgacggcaaaaagatcactgtaacagggaccctgtggaacggcaacaaaattatcgacgagcgcctgatcaaccccgacggctccctgctgttccgagtaaccatcaacgtt

SEQ ID NO: 662 - protein, 159 aa, Artificial Sequence
  Synthetic
MVFTLEDFVGDWRQTAAYNWDQVLEQGGVSSLFQNLAVSVTPIQRIVLSGENALKIDIHVIIPYEGLSADQMAQIEKIFKVVYPVDDHHFKVILHYGTLVIDGVTPNMIDYFGRPYEGIAVFDGKKITVTGTLWNGNKIIDERLINPDGSLLFRVTINV

SEQ ID NO: 663 - DNA, 477 bp, Artificial Sequence
  Synthetic
atggtcttcacactcgaagatttcgttggggactggcgacagacagccgcctacaactacgaccaagtccttgaacagggaggtgtgtccagtttgtttcagaatctcgccgtgtccgtaactccgatccaaaggattgtcctgagcggtgaaaatgccctgaagatcgacatccatgtcatcatcccgtatgaaggtctgagcgccgaccaaatggcccagatcgaaaaaatttttaaggtggtgtaccctgtggatgatcatcactttaaggtgatcctgcactatggcacactggtaatcgacggggttacgccgaacatgatcgactatttcggacggccgtatgaaggcatcgccgtgttcgacggcaaaaagatcactgtaacagggaccctgtggaacggcaacaaaattatcgacgagcgcctgatcaaccccgacggctccctgctgttccgagtaaccatcaacgtt

SEQ ID NO: 664 - protein, 159 aa, Artificial Sequence
  Synthetic
MVFTLEDFVGDWRQTAAYNYDQVLEQGGVSSLFQNLAVSVTPIQRIVLSGENALKIDIHVIIPYEGLSADQMAQIEKIFKVVYPVDDHHFKVILHYGTLVIDGVTPNMIDYFGRPYEGIAVFDGKKITVTGTLWNGNKIIDERLINPDGSLLFRVTINV

SEQ ID NO: 665 - DNA, 477 bp, Artificial Sequence
  Synthetic
atggtcttcacactcgaagatttcgttggggactggcgacagacagccgcctacaacctggaccaagtccttgaacagggaggtgtgtccagtttggcccagaatctcgccgtgtccgtaactccgatccaaaggattgtcctgagcggtgaaaatgccctgaagatcgacatccatgtcatcatcccgtatgaaggtctgagcgccgaccaaatggcccagatcgaaaaaatttttaaggtggtgtaccctgtggatgatcatcactttaaggtgatcctgcactatggcacactggtaatcgacggggttacgccgaacatgatcgactatttcggacggccgtatgaaggcatcgccgtgttcgacggcaaaaagatcactgtaacagggaccctgtggaacggcaacaaaattatcgacgagcgcctgatcaaccccgacggctccctgctgttccgagtaaccatcaacgtt

SEQ ID NO: 666 - protein, 159 aa, Artificial Sequence
  Synthetic
MVFTLEDFVGDWRQTAAYNLDQVLEQGGVSSLAQNLAVSVTPIQRIVLSGENALKIDIHVIIPYEGLSADQMAQIEKIFKVVYPVDDHHFKVILHYGTLVIDGVTPNMIDYFGRPYEGIAVFDGKKITVTGTLWNGNKIIDERLINPDGSLLFRVTINV

SEQ ID NO: 667 - DNA, 477 bp, Artificial Sequence
  Synthetic
atggtcttcacactcgaagatttcgttggggactggcgacagacagccgcctacaacctggaccaagtccttgaacagggaggtgtgtccagtttgtgccagaatctcgccgtgtccgtaactccgatccaaaggattgtcctgagcggtgaaaatgccctgaagatcgacatccatgtcatcatcccgtatgaaggtctgagcgccgaccaaatggcccagatcgaaaaaatttttaaggtggtgtaccctgtggatgatcatcactttaaggtgatcctgcactatggcacactggtaatcgacggggttacgccgaacatgatcgactatttcggacggccgtatgaaggcatcgccgtgttcgacggcaaaaagatcactgtaacagggaccctgtggaacggcaacaaaattatcgacgagcgcctgatcaaccccgacggctccctgctgttccgagtaaccatcaacgtt

SEQ ID NO: 668 - protein, 159 aa, Artificial Sequence
  Synthetic
MVFTLEDFVGDWRQTAAYNLDQVLEQGGVSSLCQNLAVSVTPIQRIVLSGENALKIDIHVIIPYEGLSADQMAQIEKIFKVVYPVDDHHFKVILHYGTLVIDGVTPNMIDYFGRPYEGIAVFDGKKITVTGTLWNGNKIIDERLINPDGSLLFRVTINV

SEQ ID NO: 669 - DNA, 477 bp, Artificial Sequence
  Synthetic
atggtcttcacactcgaagatttcgttggggactggcgacagacagccgcctacaacctggaccaagtccttgaacagggaggtgtgtccagtttggaccagaatctcgccgtgtccgtaactccgatccaaaggattgtcctgagcggtgaaaatgccctgaagatcgacatccatgtcatcatcccgtatgaaggtctgagcgccgaccaaatggcccagatcgaaaaaatttttaaggtggtgtaccctgtggatgatcatcactttaaggtgatcctgcactatggcacactggtaatcgacggggttacgccgaacatgatcgactatttcggacggccgtatgaaggcatcgccgtgttcgacggcaaaaagatcactgtaacagggaccctgtggaacggcaacaaaattatcgacgagcgcctgatcaaccccgacggctccctgctgttccgagtaaccatcaacgtt

SEQ ID NO: 670 - protein, 159 aa, Artificial Sequence
  Synthetic
MVFTLEDFVGDWRQTAAYNLDQVLEQGGVSSLDQNLAVSVTPIQRIVLSGENALKIDIHVIIPYEGLSADQMAQIEKIFKVVYPVDDHHFKVILHYGTLVIDGVTPNMIDYFGRPYEGIAVFDGKKITVTGTLWNGNKIIDERLINPDGSLLFRVTINV

SEQ ID NO: 671 - DNA, 477 bp, Artificial Sequence
  Synthetic
atggtcttcacactcgaagatttcgttggggactggcgacagacagccgcctacaacctggaccaagtccttgaacagggaggtgtgtccagtttggagcagaatctcgccgtgtccgtaactccgatccaaaggattgtcctgagcggtgaaaatgccctgaagatcgacatccatgtcatcatcccgtatgaaggtctgagcgccgaccaaatggcccagatcgaaaaaatttttaaggtggtgtaccctgtggatgatcatcactttaaggtgatcctgcactatggcacactggtaatcgacggggttacgccgaacatgatcgactatttcggacggccgtatgaaggcatcgccgtgttcgacggcaaaaagatcactgtaacagggaccctgtggaacggcaacaaaattatcgacgagcgcctgatcaaccccgacggctccctgctgttccgagtaaccatcaacgtt

SEQ ID NO: 672 - protein, 159 aa, Artificial Sequence
  Synthetic
MVFTLEDFVGDWRQTAAYNLDQVLEQGGVSSLEQNLAVSVTPIQRIVLSGENALKIDIHVIIPYEGLSADQMAQIEKIFKVVYPVDDHHFKVILHYGTLVIDGVTPNMIDYFGRPYEGIAVFDGKKITVTGTLWNGNKIIDERLINPDGSLLFRVTINV

SEQ ID NO: 673 - DNA, 477 bp, Artificial Sequence
  Synthetic
atggtcttcacactcgaagatttcgttggggactggcgacagacagccgcctacaacctggaccaagtccttgaacagggaggtgtgtccagtttgggccagaatctcgccgtgtccgtaactccgatccaaaggattgtcctgagcggtgaaaatgccctgaagatcgacatccatgtcatcatcccgtatgaaggtctgagcgccgaccaaatggcccagatcgaaaaaatttttaaggtggtgtaccctgtggatgatcatcactttaaggtgatcctgcactatggcacactggtaatcgacggggttacgccgaacatgatcgactatttcggacggccgtatgaaggcatcgccgtgttcgacggcaaaaagatcactgtaacagggaccctgtggaacggcaacaaaattatcgacgagcgcctgatcaaccccgacggctccctgctgttccgagtaaccatcaacgtt

SEQ ID NO: 674 - protein, 159 aa, Artificial Sequence
  Synthetic
MVFTLEDFVGDWRQTAAYNLDQVLEQGGVSSLGQNLAVSVTPIQRIVLSGENALKIDIHVIIPYEGLSADQMAQIEKIFKVVYPVDDHHFKVILHYGTLVIDGVTPNMIDYFGRPYEGIAVFDGKKITVTGTLWNGNKIIDERLINPDGSLLFRVTINV

SEQ ID NO: 675 - DNA, 477 bp, Artificial Sequence
  Synthetic
atggtcttcacactcgaagatttcgttggggactggcgacagacagccgcctacaacctggaccaagtccttgaacagggaggtgtgtccagtttgcaccagaatctcgccgtgtccgtaactccgatccaaaggattgtcctgagcggtgaaaatgccctgaagatcgacatccatgtcatcatcccgtatgaaggtctgagcgccgaccaaatggcccagatcgaaaaaatttttaaggtggtgtaccctgtggatgatcatcactttaaggtgatcctgcactatggcacactggtaatcgacggggttacgccgaacatgatcgactatttcggacggccgtatgaaggcatcgccgtgttcgacggcaaaaagatcactgtaacagggaccctgtggaacggcaacaaaattatcgacgagcgcctgatcaaccccgacggctccctgctgttccgagtaaccatcaacgtt

SEQ ID NO: 676 - protein, 159 aa, Artificial Sequence
  Synthetic
MVFTLEDFVGDWRQTAAYNLDQVLEQGGVSSLHQNLAVSVTPIQRIVLSGENALKIDIHVIIPYEGLSADQMAQIEKIFKVVYPVDDHHFKVILHYGTLVIDGVTPNMIDYFGRPYEGIAVFDGKKITVTGTLWNGNKIIDERLINPDGSLLFRVTINV

SEQ ID NO: 677 - DNA, 477 bp, Artificial Sequence
  Synthetic
atggtcttcacactcgaagatttcgttggggactggcgacagacagccgcctacaacctggaccaagtccttgaacagggaggtgtgtccagtttgatccagaatctcgccgtgtccgtaactccgatccaaaggattgtcctgagcggtgaaaatgccctgaagatcgacatccatgtcatcatcccgtatgaaggtctgagcgccgaccaaatggcccagatcgaaaaaatttttaaggtggtgtaccctgtggatgatcatcactttaaggtgatcctgcactatggcacactggtaatcgacggggttacgccgaacatgatcgactatttcggacggccgtatgaaggcatcgccgtgttcgacggcaaaaagatcactgtaacagggaccctgtggaacggcaacaaaattatcgacgagcgcctgatcaaccccgacggctccctgctgttccgagtaaccatcaacgtt

SEQ ID NO: 678 - protein, 159 aa, Artificial Sequence
  Synthetic
MVFTLEDFVGDWRQTAAYNLDQVLEQGGVSSLIQNLAVSVTPIQRIVLSGENALKIDIHVIIPYEGLSADQMAQIEKIFKVVYPVDDHHFKVILHYGTLVIDGVTPNMIDYFGRPYEGIAVFDGKKITVTGTLWNGNKIIDERLINPDGSLLFRVTINV

SEQ ID NO: 679 - DNA, 477 bp, Artificial Sequence
  Synthetic
atggtcttcacactcgaagatttcgttggggactggcgacagacagccgcctacaacctggaccaagtccttgaacagggaggtgtgtccagtttgaagcagaatctcgccgtgtccgtaactccgatccaaaggattgtcctgagcggtgaaaatgccctgaagatcgacatccatgtcatcatcccgtatgaaggtctgagcgccgaccaaatggcccagatcgaaaaaatttttaaggtggtgtaccctgtggatgatcatcactttaaggtgatcctgcactatggcacactggtaatcgacggggttacgccgaacatgatcgactatttcggacggccgtatgaaggcatcgccgtgttcgacggcaaaaagatcactgtaacagggaccctgtggaacggcaacaaaattatcgacgagcgcctgatcaaccccgacggctccctgctgttccgagtaaccatcaacgtt

SEQ ID NO: 680 - protein, 159 aa, Artificial Sequence
  Synthetic
MVFTLEDFVGDWRQTAAYNLDQVLEQGGVSSLKQNLAVSVTPIQRIVLSGENALKIDIHVIIPYEGLSADQMAQIEKIFKVVYPVDDHHFKVILHYGTLVIDGVTPNMIDYFGRPYEGIAVFDGKKITVTGTLWNGNKIIDERLINPDGSLLFRVTINV

SEQ ID NO: 681 - DNA, 477 bp, Artificial Sequence
  Synthetic
atggtcttcacactcgaagatttcgttggggactggcgacagacagccgcctacaacctggaccaagtccttgaacagggaggtgtgtccagtttgctgcagaatctcgccgtgtccgtaactccgatccaaaggattgtcctgagcggtgaaaatgccctgaagatcgacatccatgtcatcatcccgtatgaaggtctgagcgccgaccaaatggcccagatcgaaaaaatttttaaggtggtgtaccctgtggatgatcatcactttaaggtgatcctgcactatggcacactggtaatcgacggggttacgccgaacatgatcgactatttcggacggccgtatgaaggcatcgccgtgttcgacggcaaaaagatcactgtaacagggaccctgtggaacggcaacaaaattatcgacgagcgcctgatcaaccccgacggctccctgctgttccgagtaaccatcaacgtt

SEQ ID NO: 682 - protein, 159 aa, Artificial Sequence
  Synthetic
MVFTLEDFVGDWRQTAAYNLDQVLEQGGVSSLLQNLAVSVTPIQRIVLSGENALKIDIHVIIPYEGLSADQMAQIEKIFKVVYPVDDHHFKVILHYGTLVIDGVTPNMIDYFGRPYEGIAVFDGKKITVTGTLWNGNKIIDERLINPDGSLLFRVTINV

SEQ ID NO: 683 - DNA, 477 bp, Artificial Sequence
  Synthetic
atggtcttcacactcgaagatttcgttggggactggcgacagacagccgcctacaacctggaccaagtccttgaacagggaggtgtgtccagtttgatgcagaatctcgccgtgtccgtaactccgatccaaaggattgtcctgagcggtgaaaatgccctgaagatcgacatccatgtcatcatcccgtatgaaggtctgagcgccgaccaaatggcccagatcgaaaaaatttttaaggtggtgtaccctgtggatgatcatcactttaaggtgatcctgcactatggcacactggtaatcgacggggttacgccgaacatgatcgactatttcggacggccgtatgaaggcatcgccgtgttcgacggcaaaaagatcactgtaacagggaccctgtggaacggcaacaaaattatcgacgagcgcctgatcaaccccgacggctccctgctgttccgagtaaccatcaacgtt

SEQ ID NO: 684 - protein, 159 aa, Artificial Sequence
  Synthetic
MVFTLEDFVGDWRQTAAYNLDQVLEQGGVSSLMQNLAVSVTPIQRIVLSGENALKIDIHVIIPYEGLSADQMAQIEKIFKVVYPVDDHHFKVILHYGTLVIDGVTPNMIDYFGRPYEGIAVFDGKKITVTGTLWNGNKIIDERLINPDGSLLFRVTINV

SEQ ID NO: 685 - DNA, 477 bp, Artificial Sequence
  Synthetic
atggtcttcacactcgaagatttcgttggggactggcgacagacagccgcctacaacctggaccaagtccttgaacagggaggtgtgtccagtttgaaccagaatctcgccgtgtccgtaactccgatccaaaggattgtcctgagcggtgaaaatgccctgaagatcgacatccatgtcatcatcccgtatgaaggtctgagcgccgaccaaatggcccagatcgaaaaaatttttaaggtggtgtaccctgtggatgatcatcactttaaggtgatcctgcactatggcacactggtaatcgacggggttacgccgaacatgatcgactatttcggacggccgtatgaaggcatcgccgtgttcgacggcaaaaagatcactgtaacagggaccctgtggaacggcaacaaaattatcgacgagcgcctgatcaaccccgacggctccctgctgttccgagtaaccatcaacgtt

SEQ ID NO: 686 - protein, 159 aa, Artificial Sequence
  Synthetic
MVFTLEDFVGDWRQTAAYNLDQVLEQGGVSSLNQNLAVSVTPIQRIVLSGENALKIDIHVIIPYEGLSADQMAQIEKIFKVVYPVDDHHFKVILHYGTLVIDGVTPNMIDYFGRPYEGIAVFDGKKITVTGTLWNGNKIIDERLINPDGSLLFRVTINV

SEQ ID NO: 687 - DNA, 477 bp, Artificial Sequence
  Synthetic
atggtcttcacactcgaagatttcgttggggactggcgacagacagccgcctacaacctggaccaagtccttgaacagggaggtgtgtccagtttgccccagaatctcgccgtgtccgtaactccgatccaaaggattgtcctgagcggtgaaaatgccctgaagatcgacatccatgtcatcatcccgtatgaaggtctgagcgccgaccaaatggcccagatcgaaaaaatttttaaggtggtgtaccctgtggatgatcatcactttaaggtgatcctgcactatggcacactggtaatcgacggggttacgccgaacatgatcgactatttcggacggccgtatgaaggcatcgccgtgttcgacggcaaaaagatcactgtaacagggaccctgtggaacggcaacaaaattatcgacgagcgcctgatcaaccccgacggctccctgctgttccgagtaaccatcaacgtt

SEQ ID NO: 688 - protein, 159 aa, Artificial Sequence
  Synthetic
MVFTLEDFVGDWRQTAAYNLDQVLEQGGVSSLPQNLAVSVTPIQRIVLSGENALKIDIHVIIPYEGLSADQMAQIEKIFKVVYPVDDHHFKVILHYGTLVIDGVTPNMIDYFGRPYEGIAVFDGKKITVTGTLWNGNKIIDERLINPDGSLLFRVTINV

SEQ ID NO: 689 - DNA, 477 bp, Artificial Sequence
  Synthetic
atggtcttcacactcgaagatttcgttggggactggcgacagacagccgcctacaacctggaccaagtccttgaacagggaggtgtgtccagtttgcagcagaatctcgccgtgtccgtaactccgatccaaaggattgtcctgagcggtgaaaatgccctgaagatcgacatccatgtcatcatcccgtatgaaggtctgagcgccgaccaaatggcccagatcgaaaaaatttttaaggtggtgtaccctgtggatgatcatcactttaaggtgatcctgcactatggcacactggtaatcgacggggttacgccgaacatgatcgactatttcggacggccgtatgaaggcatcgccgtgttcgacggcaaaaagatcactgtaacagggaccctgtggaacggcaacaaaattatcgacgagcgcctgatcaaccccgacggctccctgctgttccgagtaaccatcaacgtt

SEQ ID NO: 690 - protein, 159 aa, Artificial Sequence
  Synthetic
MVFTLEDFVGDWRQTAAYNLDQVLEQGGVSSLQQNLAVSVTPIQRIVLSGENALKIDIHVIIPYEGLSADQMAQIEKIFKVVYPVDDHHFKVILHYGTLVIDGVTPNMIDYFGRPYEGIAVFDGKKITVTGTLWNGNKIIDERLINPDGSLLFRVTINV

SEQ ID NO: 691 - DNA, 477 bp, Artificial Sequence
  Synthetic
atggtcttcacactcgaagatttcgttggggactggcgacagacagccgcctacaacctggaccaagtccttgaacagggaggtgtgtccagtttgcggcagaatctcgccgtgtccgtaactccgatccaaaggattgtcctgagcggtgaaaatgccctgaagatcgacatccatgtcatcatcccgtatgaaggtctgagcgccgaccaaatggcccagatcgaaaaaatttttaaggtggtgtaccctgtggatgatcatcactttaaggtgatcctgcactatggcacactggtaatcgacggggttacgccgaacatgatcgactatttcggacggccgtatgaaggcatcgccgtgttcgacggcaaaaagatcactgtaacagggaccctgtggaacggcaacaaaattatcgacgagcgcctgatcaaccccgacggctccctgctgttccgagtaaccatcaacgtt

SEQ ID NO: 692 - protein, 159 aa, Artificial Sequence
  Synthetic
MVFTLEDFVGDWRQTAAYNLDQVLEQGGVSSLRQNLAVSVTPIQRIVLSGENALKIDIHVIIPYEGLSADQMAQIEKIFKVVYPVDDHHFKVILHYGTLVIDGVTPNMIDYFGRPYEGIAVFDGKKITVTGTLWNGNKIIDERLINPDGSLLFRVTINV

SEQ ID NO: 693 - DNA, 477 bp, Artificial Sequence
  Synthetic
atggtcttcacactcgaagatttcgttggggactggcgacagacagccgcctacaacctggaccaagtccttgaacagggaggtgtgtccagtttgagccagaatctcgccgtgtccgtaactccgatccaaaggattgtcctgagcggtgaaaatgccctgaagatcgacatccatgtcatcatcccgtatgaaggtctgagcgccgaccaaatggcccagatcgaaaaaatttttaaggtggtgtaccctgtggatgatcatcactttaaggtgatcctgcactatggcacactggtaatcgacggggttacgccgaacatgatcgactatttcggacggccgtatgaaggcatcgccgtgttcgacggcaaaaagatcactgtaacagggaccctgtggaacggcaacaaaattatcgacgagcgcctgatcaaccccgacggctccctgctgttccgagtaaccatcaacgtt

SEQ ID NO: 694 - protein, 159 aa, Artificial Sequence
  Synthetic
MVFTLEDFVGDWRQTAAYNLDQVLEQGGVSSLSQNLAVSVTPIQRIVLSGENALKIDIHVIIPYEGLSADQMAQIEKIFKVVYPVDDHHFKVILHYGTLVIDGVTPNMIDYFGRPYEGIAVFDGKKITVTGTLWNGNKIIDERLINPDGSLLFRVTINV

SEQ ID NO: 695 - DNA, 477 bp, Artificial Sequence
  Synthetic
atggtcttcacactcgaagatttcgttggggactggcgacagacagccgcctacaacctggaccaagtccttgaacagggaggtgtgtccagtttgacccagaatctcgccgtgtccgtaactccgatccaaaggattgtcctgagcggtgaaaatgccctgaagatcgacatccatgtcatcatcccgtatgaaggtctgagcgccgaccaaatggcccagatcgaaaaaatttttaaggtggtgtaccctgtggatgatcatcactttaaggtgatcctgcactatggcacactggtaatcgacggggttacgccgaacatgatcgactatttcggacggccgtatgaaggcatcgccgtgttcgacggcaaaaagatcactgtaacagggaccctgtggaacggcaacaaaattatcgacgagcgcctgatcaaccccgacggctccctgctgttccgagtaaccatcaacgtt

SEQ ID NO: 696 - protein, 159 aa, Artificial Sequence
  Synthetic
MVFTLEDFVGDWRQTAAYNLDQVLEQGGVSSLTQNLAVSVTPIQRIVLSGENALKIDIHVIIPYEGLSADQMAQIEKIFKVVYPVDDHHFKVILHYGTLVIDGVTPNMIDYFGRPYEGIAVFDGKKITVTGTLWNGNKIIDERLINPDGSLLFRVTINV

SEQ ID NO: 697 - DNA, 477 bp, Artificial Sequence
  Synthetic
atggtcttcacactcgaagatttcgttggggactggcgacagacagccgcctacaacctggaccaagtccttgaacagggaggtgtgtccagtttggtgcagaatctcgccgtgtccgtaactccgatccaaaggattgtcctgagcggtgaaaatgccctgaagatcgacatccatgtcatcatcccgtatgaaggtctgagcgccgaccaaatggcccagatcgaaaaaatttttaaggtggtgtaccctgtggatgatcatcactttaaggtgatcctgcactatggcacactggtaatcgacggggttacgccgaacatgatcgactatttcggacggccgtatgaaggcatcgccgtgttcgacggcaaaaagatcactgtaacagggaccctgtggaacggcaacaaaattatcgacgagcgcctgatcaaccccgacggctccctgctgttccgagtaaccatcaacgtt

SEQ ID NO: 698 - protein, 159 aa, Artificial Sequence
  Synthetic
MVFTLEDFVGDWRQTAAYNLDQVLEQGGVSSLVQNLAVSVTPIQRIVLSGENALKIDIHVIIPYEGLSADQMAQIEKIFKVVYPVDDHHFKVILHYGTLVIDGVTPNMIDYFGRPYEGIAVFDGKKITVTGTLWNGNKIIDERLINPDGSLLFRVTINV

SEQ ID NO: 699 - DNA, 477 bp, Artificial Sequence
  Synthetic
atggtcttcacactcgaagatttcgttggggactggcgacagacagccgcctacaacctggaccaagtccttgaacagggaggtgtgtccagtttgtggcagaatctcgccgtgtccgtaactccgatccaaaggattgtcctgagcggtgaaaatgccctgaagatcgacatccatgtcatcatcccgtatgaaggtctgagcgccgaccaaatggcccagatcgaaaaaatttttaaggtggtgtaccctgtggatgatcatcactttaaggtgatcctgcactatggcacactggtaatcgacggggttacgccgaacatgatcgactatttcggacggccgtatgaaggcatcgccgtgttcgacggcaaaaagatcactgtaacagggaccctgtggaacggcaacaaaattatcgacgagcgcctgatcaaccccgacggctccctgctgttccgagtaaccatcaacgtt

SEQ ID NO: 700 - protein, 159 aa, Artificial Sequence
  Synthetic
MVFTLEDFVGDWRQTAAYNLDQVLEQGGVSSLWQNLAVSVTPIQRIVLSGENALKIDIHVIIPYEGLSADQMAQIEKIFKVVYPVDDHHFKVILHYGTLVIDGVTPNMIDYFGRPYEGIAVFDGKKITVTGTLWNGNKIIDERLINPDGSLLFRVTINV

SEQ ID NO: 701 - DNA, 477 bp, Artificial Sequence
  Synthetic
atggtcttcacactcgaagatttcgttggggactggcgacagacagccgcctacaacctggaccaagtccttgaacagggaggtgtgtccagtttgtaccagaatctcgccgtgtccgtaactccgatccaaaggattgtcctgagcggtgaaaatgccctgaagatcgacatccatgtcatcatcccgtatgaaggtctgagcgccgaccaaatggcccagatcgaaaaaatttttaaggtggtgtaccctgtggatgatcatcactttaaggtgatcctgcactatggcacactggtaatcgacggggttacgccgaacatgatcgactatttcggacggccgtatgaaggcatcgccgtgttcgacggcaaaaagatcactgtaacagggaccctgtggaacggcaacaaaattatcgacgagcgcctgatcaaccccgacggctccctgctgttccgagtaaccatcaacgtt

SEQ ID NO: 702 - protein, 159 aa, Artificial Sequence
  Synthetic
MVFTLEDFVGDWRQTAAYNLDQVLEQGGVSSLYQNLAVSVTPIQRIVLSGENALKIDIHVIIPYEGLSADQMAQIEKIFKVVYPVDDHHFKVILHYGTLVIDGVTPNMIDYFGRPYEGIAVFDGKKITVTGTLWNGNKIIDERLINPDGSLLFRVTINV

SEQ ID NO: 703 - DNA, 477 bp, Artificial Sequence
  Synthetic
atggtcttcacactcgaagatttcgttggggactggcgacagacagccgcctacaacctggaccaagtccttgaacagggaggtgtgtccagtttgtttcagaatctcgccgtgtccgtaactccgatccaaaggattgtcctgagcggtgaaaatgccctgaagatcgacatccatgccatcatcccgtatgaaggtctgagcgccgaccaaatggcccagatcgaaaaaatttttaaggtggtgtaccctgtggatgatcatcactttaaggtgatcctgcactatggcacactggtaatcgacggggttacgccgaacatgatcgactatttcggacggccgtatgaaggcatcgccgtgttcgacggcaaaaagatcactgtaacagggaccctgtggaacggcaacaaaattatcgacgagcgcctgatcaaccccgacggctccctgctgttccgagtaaccatcaacgtt

SEQ ID NO: 704 - protein, 159 aa, Artificial Sequence
  Synthetic
MVFTLEDFVGDWRQTAAYNLDQVLEQGGVSSLFQNLAVSVTPIQRIVLSGENALKIDIHAIIPYEGLSADQMAQIEKIFKVVYPVDDHHFKVILHYGTLVIDGVTPNMIDYFGRPYEGIAVFDGKKITVTGTLWNGNKIIDERLINPDGSLLFRVTINV

SEQ ID NO: 705 - DNA, 477 bp, Artificial Sequence
  Synthetic
atggtcttcacactcgaagatttcgttggggactggcgacagacagccgcctacaacctggaccaagtccttgaacagggaggtgtgtccagtttgtttcagaatctcgccgtgtccgtaactccgatccaaaggattgtcctgagcggtgaaaatgccctgaagatcgacatccattgcatcatcccgtatgaaggtctgagcgccgaccaaatggcccagatcgaaaaaatttttaaggtggtgtaccctgtggatgatcatcactttaaggtgatcctgcactatggcacactggtaatcgacggggttacgccgaacatgatcgactatttcggacggccgtatgaaggcatcgccgtgttcgacggcaaaaagatcactgtaacagggaccctgtggaacggcaacaaaattatcgacgagcgcctgatcaaccccgacggctccctgctgttccgagtaaccatcaacgtt

SEQ ID NO: 706 - protein, 159 aa, Artificial Sequence
  Synthetic
MVFTLEDFVGDWRQTAAYNLDQVLEQGGVSSLFQNLAVSVTPIQRIVLSGENALKIDIHCIIPYEGLSADQMAQIEKIFKVVYPVDDHHFKVILHYGTLVIDGVTPNMIDYFGRPYEGIAVFDGKKITVTGTLWNGNKIIDERLINPDGSLLFRVTINV

SEQ ID NO: 707 - DNA, 477 bp, Artificial Sequence
  Synthetic
atggtcttcacactcgaagatttcgttggggactggcgacagacagccgcctacaacctggaccaagtccttgaacagggaggtgtgtccagtttgtttcagaatctcgccgtgtccgtaactccgatccaaaggattgtcctgagcggtgaaaatgccctgaagatcgacatccatgacatcatcccgtatgaaggtctgagcgccgaccaaatggcccagatcgaaaaaatttttaaggtggtgtaccctgtggatgatcatcactttaaggtgatcctgcactatggcacactggtaatcgacggggttacgccgaacatgatcgactatttcggacggccgtatgaaggcatcgccgtgttcgacggcaaaaagatcactgtaacagggaccctgtggaacggcaacaaaattatcgacgagcgcctgatcaaccccgacggctccctgctgttccgagtaaccatcaacgtt

SEQ ID NO: 708 - protein, 159 aa, Artificial Sequence
  Synthetic
MVFTLEDFVGDWRQTAAYNLDQVLEQGGVSSLFQNLAVSVTPIQRIVLSGENALKIDIHDIIPYEGLSADQMAQIEKIFKVVYPVDDHHFKVILHYGTLVIDGVTPNMIDYFGRPYEGIAVFDGKKITVTGTLWNGNKIIDERLINPDGSLLFRVTINV

SEQ ID NO: 709 - DNA, 477 bp, Artificial Sequence
  Synthetic
atggtcttcacactcgaagatttcgttggggactggcgacagacagccgcctacaacctggaccaagtccttgaacagggaggtgtgtccagtttgtttcagaatctcgccgtgtccgtaactccgatccaaaggattgtcctgagcggtgaaaatgccctgaagatcgacatccatgagatcatcccgtatgaaggtctgagcgccgaccaaatggcccagatcgaaaaaatttttaaggtggtgtaccctgtggatgatcatcactttaaggtgatcctgcactatggcacactggtaatcgacggggttacgccgaacatgatcgactatttcggacggccgtatgaaggcatcgccgtgttcgacggcaaaaagatcactgtaacagggaccctgtggaacggcaacaaaattatcgacgagcgcctgatcaaccccgacggctccctgctgttccgagtaaccatcaacgtt

SEQ ID NO: 710 - protein, 159 aa, Artificial Sequence
  Synthetic
MVFTLEDFVGDWRQTAAYNLDQVLEQGGVSSLFQNLAVSVTPIQRIVLSGENALKIDIHEIIPYEGLSADQMAQIEKIFKVVYPVDDHHFKVILHYGTLVIDGVTPNMIDYFGRPYEGIAVFDGKKITVTGTLWNGNKIIDERLINPDGSLLFRVTINV

SEQ ID NO: 711 - DNA, 477 bp, Artificial Sequence
  Synthetic
atggtcttcacactcgaagatttcgttggggactggcgacagacagccgcctacaacctggaccaagtccttgaacagggaggtgtgtccagtttgtttcagaatctcgccgtgtccgtaactccgatccaaaggattgtcctgagcggtgaaaatgccctgaagatcgacatccatttcatcatcccgtatgaaggtctgagcgccgaccaaatggcccagatcgaaaaaatttttaaggtggtgtaccctgtggatgatcatcactttaaggtgatcctgcactatggcacactggtaatcgacggggttacgccgaacatgatcgactatttcggacggccgtatgaaggcatcgccgtgttcgacggcaaaaagatcactgtaacagggaccctgtggaacggcaacaaaattatcgacgagcgcctgatcaaccccgacggctccctgctgttccgagtaaccatcaacgtt

SEQ ID NO: 712 - protein, 159 aa, Artificial Sequence
  Synthetic
MVFTLEDFVGDWRQTAAYNLDQVLEQGGVSSLFQNLAVSVTPIQRIVLSGENALKIDIHFIIPYEGLSADQMAQIEKIFKVVYPVDDHHFKVILHYGTLVIDGVTPNMIDYFGRPYEGIAVFDGKKITVTGTLWNGNKIIDERLINPDGSLLFRVTINV

SEQ ID NO: 713 - DNA, 477 bp, Artificial Sequence
  Synthetic
atggtcttcacactcgaagatttcgttggggactggcgacagacagccgcctacaacctggaccaagtccttgaacagggaggtgtgtccagtttgtttcagaatctcgccgtgtccgtaactccgatccaaaggattgtcctgagcggtgaaaatgccctgaagatcgacatccatggcatcatcccgtatgaaggtctgagcgccgaccaaatggcccagatcgaaaaaatttttaaggtggtgtaccctgtggatgatcatcactttaaggtgatcctgcactatggcacactggtaatcgacggggttacgccgaacatgatcgactatttcggacggccgtatgaaggcatcgccgtgttcgacggcaaaaagatcactgtaacagggaccctgtggaacggcaacaaaattatcgacgagcgcctgatcaaccccgacggctccctgctgttccgagtaaccatcaacgtt

SEQ ID NO: 714 - protein, 159 aa, Artificial Sequence
  Synthetic
MVFTLEDFVGDWRQTAAYNLDQVLEQGGVSSLFQNLAVSVTPIQRIVLSGENALKIDIHGIIPYEGLSADQMAQIEKIFKVVYPVDDHHFKVILHYGTLVIDGVTPNMIDYFGRPYEGIAVFDGKKITVTGTLWNGNKIIDERLINPDGSLLFRVTINV

SEQ ID NO: 715 - DNA, 477 bp, Artificial Sequence
  Synthetic
atggtcttcacactcgaagatttcgttggggactggcgacagacagccgcctacaacctggaccaagtccttgaacagggaggtgtgtccagtttgtttcagaatctcgccgtgtccgtaactccgatccaaaggattgtcctgagcggtgaaaatgccctgaagatcgacatccatcacatcatcccgtatgaaggtctgagcgccgaccaaatggcccagatcgaaaaaatttttaaggtggtgtaccctgtggatgatcatcactttaaggtgatcctgcactatggcacactggtaatcgacggggttacgccgaacatgatcgactatttcggacggccgtatgaaggcatcgccgtgttcgacggcaaaaagatcactgtaacagggaccctgtggaacggcaacaaaattatcgacgagcgcctgatcaaccccgacggctccctgctgttccgagtaaccatcaacgtt

SEQ ID NO: 716 - protein, 159 aa, Artificial Sequence
  Synthetic
MVFTLEDFVGDWRQTAAYNLDQVLEQGGVSSLFQNLAVSVTPIQRIVLSGENALKIDIHHIIPYEGLSADQMAQIEKIFKVVYPVDDHHFKVILHYGTLVIDGVTPNMIDYFGRPYEGIAVFDGKKITVTGTLWNGNKIIDERLINPDGSLLFRVTINV

SEQ ID NO: 717 - DNA, 477 bp, Artificial Sequence
  Synthetic
atggtcttcacactcgaagatttcgttggggactggcgacagacagccgcctacaacctggaccaagtccttgaacagggaggtgtgtccagtttgtttcagaatctcgccgtgtccgtaactccgatccaaaggattgtcctgagcggtgaaaatgccctgaagatcgacatccatatcatcatcccgtatgaaggtctgagcgccgaccaaatggcccagatcgaaaaaatttttaaggtggtgtaccctgtggatgatcatcactttaaggtgatcctgcactatggcacactggtaatcgacggggttacgccgaacatgatcgactatttcggacggccgtatgaaggcatcgccgtgttcgacggcaaaaagatcactgtaacagggaccctgtggaacggcaacaaaattatcgacgagcgcctgatcaaccccgacggctccctgctgttccgagtaaccatcaacgtt

SEQ ID NO: 718 - protein, 159 aa, Artificial Sequence
  Synthetic
MVFTLEDFVGDWRQTAAYNLDQVLEQGGVSSLFQNLAVSVTPIQRIVLSGENALKIDIHIIIPYEGLSADQMAQIEKIFKVVYPVDDHHFKVILHYGTLVIDGVTPNMIDYFGRPYEGIAVFDGKKITVTGTLWNGNKIIDERLINPDGSLLFRVTINV

SEQ ID NO: 719 - DNA, 477 bp, Artificial Sequence
  Synthetic
atggtcttcacactcgaagatttcgttggggactggcgacagacagccgcctacaacctggaccaagtccttgaacagggaggtgtgtccagtttgtttcagaatctcgccgtgtccgtaactccgatccaaaggattgtcctgagcggtgaaaatgccctgaagatcgacatccataagatcatcccgtatgaaggtctgagcgccgaccaaatggcccagatcgaaaaaatttttaaggtggtgtaccctgtggatgatcatcactttaaggtgatcctgcactatggcacactggtaatcgacggggttacgccgaacatgatcgactatttcggacggccgtatgaaggcatcgccgtgttcgacggcaaaaagatcactgtaacagggaccctgtggaacggcaacaaaattatcgacgagcgcctgatcaaccccgacggctccctgctgttccgagtaaccatcaacgtt

SEQ ID NO: 720 - protein, 159 aa, Artificial Sequence
  Synthetic
MVFTLEDFVGDWRQTAAYNLDQVLEQGGVSSLFQNLAVSVTPIQRIVLSGENALKIDIHKIIPYEGLSADQMAQIEKIFKVVYPVDDHHFKVILHYGTLVIDGVTPNMIDYFGRPYEGIAVFDGKKITVTGTLWNGNKIIDERLINPDGSLLFRVTINV

SEQ ID NO: 721 - DNA, 477 bp, Artificial Sequence
  Synthetic
atggtcttcacactcgaagatttcgttggggactggcgacagacagccgcctacaacctggaccaagtccttgaacagggaggtgtgtccagtttgtttcagaatctcgccgtgtccgtaactccgatccaaaggattgtcctgagcggtgaaaatgccctgaagatcgacatccatctgatcatcccgtatgaaggtctgagcgccgaccaaatggcccagatcgaaaaaatttttaaggtggtgtaccctgtggatgatcatcactttaaggtgatcctgcactatggcacactggtaatcgacggggttacgccgaacatgatcgactatttcggacggccgtatgaaggcatcgccgtgttcgacggcaaaaagatcactgtaacagggaccctgtggaacggcaacaaaattatcgacgagcgcctgatcaaccccgacggctccctgctgttccgagtaaccatcaacgtt

SEQ ID NO: 722 - protein, 159 aa, Artificial Sequence
  Synthetic
MVFTLEDFVGDWRQTAAYNLDQVLEQGGVSSLFQNLAVSVTPIQRIVLSGENALKIDIHLIIPYEGLSADQMAQIEKIFKVVYPVDDHHFKVILHYGTLVIDGVTPNMIDYFGRPYEGIAVFDGKKITVTGTLWNGNKIIDERLINPDGSLLFRVTINV

SEQ ID NO: 723 - DNA, 477 bp, Artificial Sequence
  Synthetic
atggtcttcacactcgaagatttcgttggggactggcgacagacagccgcctacaacctggaccaagtccttgaacagggaggtgtgtccagtttgtttcagaatctcgccgtgtccgtaactccgatccaaaggattgtcctgagcggtgaaaatgccctgaagatcgacatccatatgatcatcccgtatgaaggtctgagcgccgaccaaatggcccagatcgaaaaaatttttaaggtggtgtaccctgtggatgatcatcactttaaggtgatcctgcactatggcacactggtaatcgacggggttacgccgaacatgatcgactatttcggacggccgtatgaaggcatcgccgtgttcgacggcaaaaagatcactgtaacagggaccctgtggaacggcaacaaaattatcgacgagcgcctgatcaaccccgacggctccctgctgttccgagtaaccatcaacgtt

SEQ ID NO: 724 - protein, 159 aa, Artificial Sequence
  Synthetic
MVFTLEDFVGDWRQTAAYNLDQVLEQGGVSSLFQNLAVSVTPIQRIVLSGENALKIDIHMIIPYEGLSADQMAQIEKIFKVVYPVDDHHFKVILHYGTLVIDGVTPNMIDYFGRPYEGIAVFDGKKITVTGTLWNGNKIIDERLINPDGSLLFRVTINV

SEQ ID NO: 725 - DNA, 477 bp, Artificial Sequence
  Synthetic
atggtcttcacactcgaagatttcgttggggactggcgacagacagccgcctacaacctggaccaagtccttgaacagggaggtgtgtccagtttgtttcagaatctcgccgtgtccgtaactccgatccaaaggattgtcctgagcggtgaaaatgccctgaagatcgacatccataacatcatcccgtatgaaggtctgagcgccgaccaaatggcccagatcgaaaaaatttttaaggtggtgtaccctgtggatgatcatcactttaaggtgatcctgcactatggcacactggtaatcgacggggttacgccgaacatgatcgactatttcggacggccgtatgaaggcatcgccgtgttcgacggcaaaaagatcactgtaacagggaccctgtggaacggcaacaaaattatcgacgagcgcctgatcaaccccgacggctccctgctgttccgagtaaccatcaacgtt

SEQ ID NO: 726 - protein, 159 aa, Artificial Sequence
  Synthetic
MVFTLEDFVGDWRQTAAYNLDQVLEQGGVSSLFQNLAVSVTPIQRIVLSGENALKIDIHNIIPYEGLSADQMAQIEKIFKVVYPVDDHHFKVILHYGTLVIDGVTPNMIDYFGRPYEGIAVFDGKKITVTGTLWNGNKIIDERLINPDGSLLFRVTINV

SEQ ID NO: 727 - DNA, 477 bp, Artificial Sequence
  Synthetic
atggtcttcacactcgaagatttcgttggggactggcgacagacagccgcctacaacctggaccaagtccttgaacagggaggtgtgtccagtttgtttcagaatctcgccgtgtccgtaactccgatccaaaggattgtcctgagcggtgaaaatgccctgaagatcgacatccatcccatcatcccgtatgaaggtctgagcgccgaccaaatggcccagatcgaaaaaatttttaaggtggtgtaccctgtggatgatcatcactttaaggtgatcctgcactatggcacactggtaatcgacggggttacgccgaacatgatcgactatttcggacggccgtatgaaggcatcgccgtgttcgacggcaaaaagatcactgtaacagggaccctgtggaacggcaacaaaattatcgacgagcgcctgatcaaccccgacggctccctgctgttccgagtaaccatcaacgtt

SEQ ID NO: 728 - protein, 159 aa, Artificial Sequence
  Synthetic
MVFTLEDFVGDWRQTAAYNLDQVLEQGGVSSLFQNLAVSVTPIQRIVLSGENALKIDIHPIIPYEGLSADQMAQIEKIFKVVYPVDDHHFKVILHYGTLVIDGVTPNMIDYFGRPYEGIAVFDGKKITVTGTLWNGNKIIDERLINPDGSLLFRVTINV

SEQ ID NO: 729 - DNA, 477 bp, Artificial Sequence
  Synthetic
atggtcttcacactcgaagatttcgttggggactggcgacagacagccgcctacaacctggaccaagtccttgaacagggaggtgtgtccagtttgtttcagaatctcgccgtgtccgtaactccgatccaaaggattgtcctgagcggtgaaaatgccctgaagatcgacatccatcagatcatcccgtatgaaggtctgagcgccgaccaaatggcccagatcgaaaaaatttttaaggtggtgtaccctgtggatgatcatcactttaaggtgatcctgcactatggcacactggtaatcgacggggttacgccgaacatgatcgactatttcggacggccgtatgaaggcatcgccgtgttcgacggcaaaaagatcactgtaacagggaccctgtggaacggcaacaaaattatcgacgagcgcctgatcaaccccgacggctccctgctgttccgagtaaccatcaacgtt

SEQ ID NO: 730 - protein, 159 aa, Artificial Sequence
  Synthetic
MVFTLEDFVGDWRQTAAYNLDQVLEQGGVSSLFQNLAVSVTPIQRIVLSGENALKIDIHQIIPYEGLSADQMAQIEKIFKVVYPVDDHHFKVILHYGTLVIDGVTPNMIDYFGRPYEGIAVFDGKKITVTGTLWNGNKIIDERLINPDGSLLFRVTINV

SEQ ID NO: 731 - DNA, 477 bp, Artificial Sequence
  Synthetic
atggtcttcacactcgaagatttcgttggggactggcgacagacagccgcctacaacctggaccaagtccttgaacagggaggtgtgtccagtttgtttcagaatctcgccgtgtccgtaactccgatccaaaggattgtcctgagcggtgaaaatgccctgaagatcgacatccatcggatcatcccgtatgaaggtctgagcgccgaccaaatggcccagatcgaaaaaatttttaaggtggtgtaccctgtggatgatcatcactttaaggtgatcctgcactatggcacactggtaatcgacggggttacgccgaacatgatcgactatttcggacggccgtatgaaggcatcgccgtgttcgacggcaaaaagatcactgtaacagggaccctgtggaacggcaacaaaattatcgacgagcgcctgatcaaccccgacggctccctgctgttccgagtaaccatcaacgtt

SEQ ID NO: 732 - protein, 159 aa, Artificial Sequence
  Synthetic
MVFTLEDFVGDWRQTAAYNLDQVLEQGGVSSLFQNLAVSVTPIQRIVLSGENALKIDIHRIIPYEGLSADQMAQIEKIFKVVYPVDDHHFKVILHYGTLVIDGVTPNMIDYFGRPYEGIAVFDGKKITVTGTLWNGNKIIDERLINPDGSLLFRVTINV

SEQ ID NO: 733 - DNA, 477 bp, Artificial Sequence
  Synthetic
atggtcttcacactcgaagatttcgttggggactggcgacagacagccgcctacaacctggaccaagtccttgaacagggaggtgtgtccagtttgtttcagaatctcgccgtgtccgtaactccgatccaaaggattgtcctgagcggtgaaaatgccctgaagatcgacatccatagcatcatcccgtatgaaggtctgagcgccgaccaaatggcccagatcgaaaaaatttttaaggtggtgtaccctgtggatgatcatcactttaaggtgatcctgcactatggcacactggtaatcgacggggttacgccgaacatgatcgactatttcggacggccgtatgaaggcatcgccgtgttcgacggcaaaaagatcactgtaacagggaccctgtggaacggcaacaaaattatcgacgagcgcctgatcaaccccgacggctccctgctgttccgagtaaccatcaacgtt

SEQ ID NO: 734 - protein, 159 aa, Artificial Sequence
  Synthetic
MVFTLEDFVGDWRQTAAYNLDQVLEQGGVSSLFQNLAVSVTPIQRIVLSGENALKIDIHSIIPYEGLSADQMAQIEKIFKVVYPVDDHHFKVILHYGTLVIDGVTPNMIDYFGRPYEGIAVFDGKKITVTGTLWNGNKIIDERLINPDGSLLFRVTINV

SEQ ID NO: 735 - DNA, 477 bp, Artificial Sequence
  Synthetic
atggtcttcacactcgaagatttcgttggggactggcgacagacagccgcctacaacctggaccaagtccttgaacagggaggtgtgtccagtttgtttcagaatctcgccgtgtccgtaactccgatccaaaggattgtcctgagcggtgaaaatgccctgaagatcgacatccataccatcatcccgtatgaaggtctgagcgccgaccaaatggcccagatcgaaaaaatttttaaggtggtgtaccctgtggatgatcatcactttaaggtgatcctgcactatggcacactggtaatcgacggggttacgccgaacatgatcgactatttcggacggccgtatgaaggcatcgccgtgttcgacggcaaaaagatcactgtaacagggaccctgtggaacggcaacaaaattatcgacgagcgcctgatcaaccccgacggctccctgctgttccgagtaaccatcaacgtt

SEQ ID NO: 736 - protein, 159 aa, Artificial Sequence
  Synthetic
MVFTLEDFVGDWRQTAAYNLDQVLEQGGVSSLFQNLAVSVTPIQRIVLSGENALKIDIHTIIPYEGLSADQMAQIEKIFKVVYPVDDHHFKVILHYGTLVIDGVTPNMIDYFGRPYEGIAVFDGKKITVTGTLWNGNKIIDERLINPDGSLLFRVTINV

SEQ ID NO: 737 - DNA, 477 bp, Artificial Sequence
  Synthetic
atggtcttcacactcgaagatttcgttggggactggcgacagacagccgcctacaacctggaccaagtccttgaacagggaggtgtgtccagtttgtttcagaatctcgccgtgtccgtaactccgatccaaaggattgtcctgagcggtgaaaatgccctgaagatcgacatccattggatcatcccgtatgaaggtctgagcgccgaccaaatggcccagatcgaaaaaatttttaaggtggtgtaccctgtggatgatcatcactttaaggtgatcctgcactatggcacactggtaatcgacggggttacgccgaacatgatcgactatttcggacggccgtatgaaggcatcgccgtgttcgacggcaaaaagatcactgtaacagggaccctgtggaacggcaacaaaattatcgacgagcgcctgatcaaccccgacggctccctgctgttccgagtaaccatcaacgtt

SEQ ID NO: 738 - protein, 159 aa, Artificial Sequence
  Synthetic
MVFTLEDFVGDWRQTAAYNLDQVLEQGGVSSLFQNLAVSVTPIQRIVLSGENALKIDIHWIIPYEGLSADQMAQIEKIFKVVYPVDDHHFKVILHYGTLVIDGVTPNMIDYFGRPYEGIAVFDGKKITVTGTLWNGNKIIDERLINPDGSLLFRVTINV

SEQ ID NO: 739 - DNA, 477 bp, Artificial Sequence
  Synthetic
atggtcttcacactcgaagatttcgttggggactggcgacagacagccgcctacaacctggaccaagtccttgaacagggaggtgtgtccagtttgtttcagaatctcgccgtgtccgtaactccgatccaaaggattgtcctgagcggtgaaaatgccctgaagatcgacatccattacatcatcccgtatgaaggtctgagcgccgaccaaatggcccagatcgaaaaaatttttaaggtggtgtaccctgtggatgatcatcactttaaggtgatcctgcactatggcacactggtaatcgacggggttacgccgaacatgatcgactatttcggacggccgtatgaaggcatcgccgtgttcgacggcaaaaagatcactgtaacagggaccctgtggaacggcaacaaaattatcgacgagcgcctgatcaaccccgacggctccctgctgttccgagtaaccatcaacgtt

SEQ ID NO: 740 - protein, 159 aa, Artificial Sequence
  Synthetic
MVFTLEDFVGDWRQTAAYNLDQVLEQGGVSSLFQNLAVSVTPIQRIVLSGENALKIDIHYIIPYEGLSADQMAQIEKIFKVVYPVDDHHFKVILHYGTLVIDGVTPNMIDYFGRPYEGIAVFDGKKITVTGTLWNGNKIIDERLINPDGSLLFRVTINV

SEQ ID NO: 741 - DNA, 477 bp, Artificial Sequence
  Synthetic
atggtcttcacactcgaagatttcgttggggactggcgacagacagccgcctacaacctggaccaagtccttgaacagggaggtgtgtccagtttgtttcagaatctcgccgtgtccgtaactccgatccaaaggattgtcctgagcggtgaaaatgccctgaagatcgacatccatgtcatcatcccgtatgaaggtctgagctgcgaccaaatggcccagatcgaaaaaatttttaaggtggtgtaccctgtggatgatcatcactttaaggtgatcctgcactatggcacactggtaatcgacggggttacgccgaacatgatcgactatttcggacggccgtatgaaggcatcgccgtgttcgacggcaaaaagatcactgtaacagggaccctgtggaacggcaacaaaattatcgacgagcgcctgatcaaccccgacggctccctgctgttccgagtaaccatcaacgtt

SEQ ID NO: 742 - protein, 159 aa, Artificial Sequence
  Synthetic
MVFTLEDFVGDWRQTAAYNLDQVLEQGGVSSLFQNLAVSVTPIQRIVLSGENALKIDIHVIIPYEGLSCDQMAQIEKIFKVVYPVDDHHFKVILHYGTLVIDGVTPNMIDYFGRPYEGIAVFDGKKITVTGTLWNGNKIIDERLINPDGSLLFRVTINV

SEQ ID NO: 743 - DNA, 477 bp, Artificial Sequence
  Synthetic
atggtcttcacactcgaagatttcgttggggactggcgacagacagccgcctacaacctggaccaagtccttgaacagggaggtgtgtccagtttgtttcagaatctcgccgtgtccgtaactccgatccaaaggattgtcctgagcggtgaaaatgccctgaagatcgacatccatgtcatcatcccgtatgaaggtctgagcgacgaccaaatggcccagatcgaaaaaatttttaaggtggtgtaccctgtggatgatcatcactttaaggtgatcctgcactatggcacactggtaatcgacggggttacgccgaacatgatcgactatttcggacggccgtatgaaggcatcgccgtgttcgacggcaaaaagatcactgtaacagggaccctgtggaacggcaacaaaattatcgacgagcgcctgatcaaccccgacggctccctgctgttccgagtaaccatcaacgtt

SEQ ID NO: 744 - protein, 159 aa, Artificial Sequence
  Synthetic
MVFTLEDFVGDWRQTAAYNLDQVLEQGGVSSLFQNLAVSVTPIQRIVLSGENALKIDIHVIIPYEGLSDDQMAQIEKIFKVVYPVDDHHFKVILHYGTLVIDGVTPNMIDYFGRPYEGIAVFDGKKITVTGTLWNGNKIIDERLINPDGSLLFRVTINV

SEQ ID NO: 745 - DNA, 477 bp, Artificial Sequence
  Synthetic
atggtcttcacactcgaagatttcgttggggactggcgacagacagccgcctacaacctggaccaagtccttgaacagggaggtgtgtccagtttgtttcagaatctcgccgtgtccgtaactccgatccaaaggattgtcctgagcggtgaaaatgccctgaagatcgacatccatgtcatcatcccgtatgaaggtctgagcgaggaccaaatggcccagatcgaaaaaatttttaaggtggtgtaccctgtggatgatcatcactttaaggtgatcctgcactatggcacactggtaatcgacggggttacgccgaacatgatcgactatttcggacggccgtatgaaggcatcgccgtgttcgacggcaaaaagatcactgtaacagggaccctgtggaacggcaacaaaattatcgacgagcgcctgatcaaccccgacggctccctgctgttccgagtaaccatcaacgtt

SEQ ID NO: 746 - protein, 159 aa, Artificial Sequence
  Synthetic
MVFTLEDFVGDWRQTAAYNLDQVLEQGGVSSLFQNLAVSVTPIQRIVLSGENALKIDIHVIIPYEGLSEDQMAQIEKIFKVVYPVDDHHFKVILHYGTLVIDGVTPNMIDYFGRPYEGIAVFDGKKITVTGTLWNGNKIIDERLINPDGSLLFRVTINV

SEQ ID NO: 747 - DNA, 477 bp, Artificial Sequence
  Synthetic
atggtcttcacactcgaagatttcgttggggactggcgacagacagccgcctacaacctggaccaagtccttgaacagggaggtgtgtccagtttgtttcagaatctcgccgtgtccgtaactccgatccaaaggattgtcctgagcggtgaaaatgccctgaagatcgacatccatgtcatcatcccgtatgaaggtctgagcttcgaccaaatggcccagatcgaaaaaatttttaaggtggtgtaccctgtggatgatcatcactttaaggtgatcctgcactatggcacactggtaatcgacggggttacgccgaacatgatcgactatttcggacggccgtatgaaggcatcgccgtgttcgacggcaaaaagatcactgtaacagggaccctgtggaacggcaacaaaattatcgacgagcgcctgatcaaccccgacggctccctgctgttccgagtaaccatcaacgtt

SEQ ID NO: 748 - protein, 159 aa, Artificial Sequence
  Synthetic
MVFTLEDFVGDWRQTAAYNLDQVLEQGGVSSLFQNLAVSVTPIQRIVLSGENALKIDIHVIIPYEGLSFDQMAQIEKIFKVVYPVDDHHFKVILHYGTLVIDGVTPNMIDYFGRPYEGIAVFDGKKITVTGTLWNGNKIIDERLINPDGSLLFRVTINV

SEQ ID NO: 749 - DNA, 477 bp, Artificial Sequence; identical to SEQ ID NO: 547
  Synthetic

SEQ ID NO: 750 - protein, 159 aa, Artificial Sequence; identical to SEQ ID NO: 548
  Synthetic

SEQ ID NO: 751 - DNA, 477 bp, Artificial Sequence
  Synthetic
atggtcttcacactcgaagatttcgttggggactggcgacagacagccgcctacaacctggaccaagtccttgaacagggaggtgtgtccagtttgtttcagaatctcgccgtgtccgtaactccgatccaaaggattgtcctgagcggtgaaaatgccctgaagatcgacatccatgtcatcatcccgtatgaaggtctgagccacgaccaaatggcccagatcgaaaaaatttttaaggtggtgtaccctgtggatgatcatcactttaaggtgatcctgcactatggcacactggtaatcgacggggttacgccgaacatgatcgactatttcggacggccgtatgaaggcatcgccgtgttcgacggcaaaaagatcactgtaacagggaccctgtggaacggcaacaaaattatcgacgagcgcctgatcaaccccgacggctccctgctgttccgagtaaccatcaacgtt

SEQ ID NO: 752 - protein, 159 aa, Artificial Sequence
  Synthetic
MVFTLEDFVGDWRQTAAYNLDQVLEQGGVSSLFQNLAVSVTPIQRIVLSGENALKIDIHVIIPYEGLSHDQMAQIEKIFKVVYPVDDHHFKVILHYGTLVIDGVTPNMIDYFGRPYEGIAVFDGKKITVTGTLWNGNKIIDERLINPDGSLLFRVTINV

SEQ ID NO: 753 - DNA, 477 bp, Artificial Sequence
  Synthetic
atggtcttcacactcgaagatttcgttggggactggcgacagacagccgcctacaacctggaccaagtccttgaacagggaggtgtgtccagtttgtttcagaatctcgccgtgtccgtaactccgatccaaaggattgtcctgagcggtgaaaatgccctgaagatcgacatccatgtcatcatcccgtatgaaggtctgagcatcgaccaaatggcccagatcgaaaaaatttttaaggtggtgtaccctgtggatgatcatcactttaaggtgatcctgcactatggcacactggtaatcgacggggttacgccgaacatgatcgactatttcggacggccgtatgaaggcatcgccgtgttcgacggcaaaaagatcactgtaacagggaccctgtggaacggcaacaaaattatcgacgagcgcctgatcaaccccgacggctccctgctgttccgagtaaccatcaacgtt

SEQ ID NO: 754 - protein, 159 aa, Artificial Sequence
  Synthetic
MVFTLEDFVGDWRQTAAYNLDQVLEQGGVSSLFQNLAVSVTPIQRIVLSGENALKIDIHVIIPYEGLSIDQMAQIEKIFKVVYPVDDHHFKVILHYGTLVIDGVTPNMIDYFGRPYEGIAVFDGKKITVTGTLWNGNKIIDERLINPDGSLLFRVTINV

SEQ ID NO: 755 - DNA, 477 bp, Artificial Sequence
  Synthetic
atggtcttcacactcgaagatttcgttggggactggcgacagacagccgcctacaacctggaccaagtccttgaacagggaggtgtgtccagtttgtttcagaatctcgccgtgtccgtaactccgatccaaaggattgtcctgagcggtgaaaatgccctgaagatcgacatccatgtcatcatcccgtatgaaggtctgagcaaggaccaaatggcccagatcgaaaaaatttttaaggtggtgtaccctgtggatgatcatcactttaaggtgatcctgcactatggcacactggtaatcgacggggttacgccgaacatgatcgactatttcggacggccgtatgaaggcatcgccgtgttcgacggcaaaaagatcactgtaacagggaccctgtggaacggcaacaaaattatcgacgagcgcctgatcaaccccgacggctccctgctgttccgagtaaccatcaacgtt

SEQ ID NO: 756 - protein, 159 aa, Artificial Sequence
  Synthetic
MVFTLEDFVGDWRQTAAYNLDQVLEQGGVSSLFQNLAVSVTPIQRIVLSGENALKIDIHVIIPYEGLSKDQMAQIEKIFKVVYPVDDHHFKVILHYGTLVIDGVTPNMIDYFGRPYEGIAVFDGKKITVTGTLWNGNKIIDERLINPDGSLLFRVTINV

SEQ ID NO: 757 - DNA, 477 bp, Artificial Sequence
  Synthetic
atggtcttcacactcgaagatttcgttggggactggcgacagacagccgcctacaacctggaccaagtccttgaacagggaggtgtgtccagtttgtttcagaatctcgccgtgtccgtaactccgatccaaaggattgtcctgagcggtgaaaatgccctgaagatcgacatccatgtcatcatcccgtatgaaggtctgagcctggaccaaatggcccagatcgaaaaaatttttaaggtggtgtaccctgtggatgatcatcactttaaggtgatcctgcactatggcacactggtaatcgacggggttacgccgaacatgatcgactatttcggacggccgtatgaaggcatcgccgtgttcgacggcaaaaagatcactgtaacagggaccctgtggaacggcaacaaaattatcgacgagcgcctgatcaaccccgacggctccctgctgttccgagtaaccatcaacgtt

SEQ ID NO: 758 - protein, 159 aa, Artificial Sequence
  Synthetic
MVFTLEDFVGDWRQTAAYNLDQVLEQGGVSSLFQNLAVSVTPIQRIVLSGENALKIDIHVIIPYEGLSLDQMAQIEKIFKVVYPVDDHHFKVILHYGTLVIDGVTPNMIDYFGRPYEGIAVFDGKKITVTGTLWNGNKIIDERLINPDGSLLFRVTINV

SEQ ID NO: 759 - DNA, 477 bp, Artificial Sequence
  Synthetic
atggtcttcacactcgaagatttcgttggggactggcgacagacagccgcctacaacctggaccaagtccttgaacagggaggtgtgtccagtttgtttcagaatctcgccgtgtccgtaactccgatccaaaggattgtcctgagcggtgaaaatgccctgaagatcgacatccatgtcatcatcccgtatgaaggtctgagcatggaccaaatggcccagatcgaaaaaatttttaaggtggtgtaccctgtggatgatcatcactttaaggtgatcctgcactatggcacactggtaatcgacggggttacgccgaacatgatcgactatttcggacggccgtatgaaggcatcgccgtgttcgacggcaaaaagatcactgtaacagggaccctgtggaacggcaacaaaattatcgacgagcgcctgatcaaccccgacggctccctgctgttccgagtaaccatcaacgtt

SEQ ID NO: 760 - protein, 159 aa, Artificial Sequence
  Synthetic
MVFTLEDFVGDWRQTAAYNLDQVLEQGGVSSLFQNLAVSVTPIQRIVLSGENALKIDIHVIIPYEGLSMDQMAQIEKIFKVVYPVDDHHFKVILHYGTLVIDGVTPNMIDYFGRPYEGIAVFDGKKITVTGTLWNGNKIIDERLINPDGSLLFRVTINV

SEQ ID NO: 761 - DNA, 477 bp, Artificial Sequence
  Synthetic
atggtcttcacactcgaagatttcgttggggactggcgacagacagccgcctacaacctggaccaagtccttgaacagggaggtgtgtccagtttgtttcagaatctcgccgtgtccgtaactccgatccaaaggattgtcctgagcggtgaaaatgccctgaagatcgacatccatgtcatcatcccgtatgaaggtctgagcaacgaccaaatggcccagatcgaaaaaatttttaaggtggtgtaccctgtggatgatcatcactttaaggtgatcctgcactatggcacactggtaatcgacggggttacgccgaacatgatcgactatttcggacggccgtatgaaggcatcgccgtgttcgacggcaaaaagatcactgtaacagggaccctgtggaacggcaacaaaattatcgacgagcgcctgatcaaccccgacggctccctgctgttccgagtaaccatcaacgtt

SEQ ID NO: 762 - protein, 159 aa, Artificial Sequence
  Synthetic
MVFTLEDFVGDWRQTAAYNLDQVLEQGGVSSLFQNLAVSVTPIQRIVLSGENALKIDIHVIIPYEGLSNDQMAQIEKIFKVVYPVDDHHFKVILHYGTLVIDGVTPNMIDYFGRPYEGIAVFDGKKITVTGTLWNGNKIIDERLINPDGSLLFRVTINV

SEQ ID NO: 763 - DNA, 477 bp, Artificial Sequence
  Synthetic
atggtcttcacactcgaagatttcgttggggactggcgacagacagccgcctacaacctggaccaagtccttgaacagggaggtgtgtccagtttgtttcagaatctcgccgtgtccgtaactccgatccaaaggattgtcctgagcggtgaaaatgccctgaagatcgacatccatgtcatcatcccgtatgaaggtctgagccccgaccaaatggcccagatcgaaaaaatttttaaggtggtgtaccctgtggatgatcatcactttaaggtgatcctgcactatggcacactggtaatcgacggggttacgccgaacatgatcgactatttcggacggccgtatgaaggcatcgccgtgttcgacggcaaaaagatcactgtaacagggaccctgtggaacggcaacaaaattatcgacgagcgcctgatcaaccccgacggctccctgctgttccgagtaaccatcaacgtt

SEQ ID NO: 764 - protein, 159 aa, Artificial Sequence
  Synthetic
MVFTLEDFVGDWRQTAAYNLDQVLEQGGVSSLFQNLAVSVTPIQRIVLSGENALKIDIHVIIPYEGLSPDQMAQIEKIFKVVYPVDDHHFKVILHYGTLVIDGVTPNMIDYFGRPYEGIAVFDGKKITVTGTLWNGNKIIDERLINPDGSLLFRVTINV

SEQ ID NO: 765 - DNA, 477 bp, Artificial Sequence
  Synthetic
atggtcttcacactcgaagatttcgttggggactggcgacagacagccgcctacaacctggaccaagtccttgaacagggaggtgtgtccagtttgtttcagaatctcgccgtgtccgtaactccgatccaaaggattgtcctgagcggtgaaaatgccctgaagatcgacatccatgtcatcatcccgtatgaaggtctgagccaggaccaaatggcccagatcgaaaaaatttttaaggtggtgtaccctgtggatgatcatcactttaaggtgatcctgcactatggcacactggtaatcgacggggttacgccgaacatgatcgactatttcggacggccgtatgaaggcatcgccgtgttcgacggcaaaaagatcactgtaacagggaccctgtggaacggcaacaaaattatcgacgagcgcctgatcaaccccgacggctccctgctgttccgagtaaccatcaacgtt

SEQ ID NO: 766 - protein, 159 aa, Artificial Sequence
  Synthetic
MVFTLEDFVGDWRQTAAYNLDQVLEQGGVSSLFQNLAVSVTPIQRIVLSGENALKIDIHVIIPYEGLSQDQMAQIEKIFKVVYPVDDHHFKVILHYGTLVIDGVTPNMIDYFGRPYEGIAVFDGKKITVTGTLWNGNKIIDERLINPDGSLLFRVTINV

SEQ ID NO: 767 - DNA, 477 bp, Artificial Sequence
  Synthetic
atggtcttcacactcgaagatttcgttggggactggcgacagacagccgcctacaacctggaccaagtccttgaacagggaggtgtgtccagtttgtttcagaatctcgccgtgtccgtaactccgatccaaaggattgtcctgagcggtgaaaatgccctgaagatcgacatccatgtcatcatcccgtatgaaggtctgagccgggaccaaatggcccagatcgaaaaaatttttaaggtggtgtaccctgtggatgatcatcactttaaggtgatcctgcactatggcacactggtaatcgacggggttacgccgaacatgatcgactatttcggacggccgtatgaaggcatcgccgtgttcgacggcaaaaagatcactgtaacagggaccctgtggaacggcaacaaaattatcgacgagcgcctgatcaaccccgacggctccctgctgttccgagtaaccatcaacgtt

SEQ ID NO: 768 - protein, 159 aa, Artificial Sequence
  Synthetic
MVFTLEDFVGDWRQTAAYNLDQVLEQGGVSSLFQNLAVSVTPIQRIVLSGENALKIDIHVIIPYEGLSRDQMAQIEKIFKVVYPVDDHHFKVILHYGTLVIDGVTPNMIDYFGRPYEGIAVFDGKKITVTGTLWNGNKIIDERLINPDGSLLFRVTINV

SEQ ID NO: 769 - DNA, 477 bp, Artificial Sequence
  Synthetic
atggtcttcacactcgaagatttcgttggggactggcgacagacagccgcctacaacctggaccaagtccttgaacagggaggtgtgtccagtttgtttcagaatctcgccgtgtccgtaactccgatccaaaggattgtcctgagcggtgaaaatgccctgaagatcgacatccatgtcatcatcccgtatgaaggtctgagcagcgaccaaatggcccagatcgaaaaaatttttaaggtggtgtaccctgtggatgatcatcactttaaggtgatcctgcactatggcacactggtaatcgacggggttacgccgaacatgatcgactatttcggacggccgtatgaaggcatcgccgtgttcgacggcaaaaagatcactgtaacagggaccctgtggaacggcaacaaaattatcgacgagcgcctgatcaaccccgacggctccctgctgttccgagtaaccatcaacgtt

SEQ ID NO: 770 - protein, 159 aa, Artificial Sequence
  Synthetic
MVFTLEDFVGDWRQTAAYNLDQVLEQGGVSSLFQNLAVSVTPIQRIVLSGENALKIDIHVIIPYEGLSSDQMAQIEKIFKVVYPVDDHHFKVILHYGTLVIDGVTPNMIDYFGRPYEGIAVFDGKKITVTGTLWNGNKIIDERLINPDGSLLFRVTINV

SEQ ID NO: 771 - DNA, 477 bp, Artificial Sequence
  Synthetic
atggtcttcacactcgaagatttcgttggggactggcgacagacagccgcctacaacctggaccaagtccttgaacagggaggtgtgtccagtttgtttcagaatctcgccgtgtccgtaactccgatccaaaggattgtcctgagcggtgaaaatgccctgaagatcgacatccatgtcatcatcccgtatgaaggtctgagcaccgaccaaatggcccagatcgaaaaaatttttaaggtggtgtaccctgtggatgatcatcactttaaggtgatcctgcactatggcacactggtaatcgacggggttacgccgaacatgatcgactatttcggacggccgtatgaaggcatcgccgtgttcgacggcaaaaagatcactgtaacagggaccctgtggaacggcaacaaaattatcgacgagcgcctgatcaaccccgacggctccctgctgttccgagtaaccatcaacgtt

SEQ ID NO: 772 - protein, 159 aa, Artificial Sequence
  Synthetic
MVFTLEDFVGDWRQTAAYNLDQVLEQGGVSSLFQNLAVSVTPIQRIVLSGENALKIDIHVIIPYEGLSTDQMAQIEKIFKVVYPVDDHHFKVILHYGTLVIDGVTPNMIDYFGRPYEGIAVFDGKKITVTGTLWNGNKIIDERLINPDGSLLFRVTINV

SEQ ID NO: 773 - DNA, 477 bp, Artificial Sequence
  Synthetic
atggtcttcacactcgaagatttcgttggggactggcgacagacagccgcctacaacctggaccaagtccttgaacagggaggtgtgtccagtttgtttcagaatctcgccgtgtccgtaactccgatccaaaggattgtcctgagcggtgaaaatgccctgaagatcgacatccatgtcatcatcccgtatgaaggtctgagcgtggaccaaatggcccagatcgaaaaaatttttaaggtggtgtaccctgtggatgatcatcactttaaggtgatcctgcactatggcacactggtaatcgacggggttacgccgaacatgatcgactatttcggacggccgtatgaaggcatcgccgtgttcgacggcaaaaagatcactgtaacagggaccctgtggaacggcaacaaaattatcgacgagcgcctgatcaaccccgacggctccctgctgttccgagtaaccatcaacgtt

SEQ ID NO: 774 - protein, 159 aa, Artificial Sequence
  Synthetic
MVFTLEDFVGDWRQTAAYNLDQVLEQGGVSSLFQNLAVSVTPIQRIVLSGENALKIDIHVIIPYEGLSVDQMAQIEKIFKVVYPVDDHHFKVILHYGTLVIDGVTPNMIDYFGRPYEGIAVFDGKKITVTGTLWNGNKIIDERLINPDGSLLFRVTINV

SEQ ID NO: 775 - DNA, 477 bp, Artificial Sequence
  Synthetic
atggtcttcacactcgaagatttcgttggggactggcgacagacagccgcctacaacctggaccaagtccttgaacagggaggtgtgtccagtttgtttcagaatctcgccgtgtccgtaactccgatccaaaggattgtcctgagcggtgaaaatgccctgaagatcgacatccatgtcatcatcccgtatgaaggtctgagctgggaccaaatggcccagatcgaaaaaatttttaaggtggtgtaccctgtggatgatcatcactttaaggtgatcctgcactatggcacactggtaatcgacggggttacgccgaacatgatcgactatttcggacggccgtatgaaggcatcgccgtgttcgacggcaaaaagatcactgtaacagggaccctgtggaacggcaacaaaattatcgacgagcgcctgatcaaccccgacggctccctgctgttccgagtaaccatcaacgtt

SEQ ID NO: 776 - protein, 159 aa, Artificial Sequence
  Synthetic
MVFTLEDFVGDWRQTAAYNLDQVLEQGGVSSLFQNLAVSVTPIQRIVLSGENALKIDIHVIIPYEGLSWDQMAQIEKIFKVVYPVDDHHFKVILHYGTLVIDGVTPNMIDYFGRPYEGIAVFDGKKITVTGTLWNGNKIIDERLINPDGSLLFRVTINV

SEQ ID NO: 777 - DNA, 477 bp, Artificial Sequence
  Synthetic
atggtcttcacactcgaagatttcgttggggactggcgacagacagccgcctacaacctggaccaagtccttgaacagggaggtgtgtccagtttgtttcagaatctcgccgtgtccgtaactccgatccaaaggattgtcctgagcggtgaaaatgccctgaagatcgacatccatgtcatcatcccgtatgaaggtctgagctacgaccaaatggcccagatcgaaaaaatttttaaggtggtgtaccctgtggatgatcatcactttaaggtgatcctgcactatggcacactggtaatcgacggggttacgccgaacatgatcgactatttcggacggccgtatgaaggcatcgccgtgttcgacggcaaaaagatcactgtaacagggaccctgtggaacggcaacaaaattatcgacgagcgcctgatcaaccccgacggctccctgctgttccgagtaaccatcaacgtt

SEQ ID NO: 778 - protein, 159 aa, Artificial Sequence
  Synthetic
MVFTLEDFVGDWRQTAAYNLDQVLEQGGVSSLFQNLAVSVTPIQRIVLSGENALKIDIHVIIPYEGLSYDQMAQIEKIFKVVYPVDDHHFKVILHYGTLVIDGVTPNMIDYFGRPYEGIAVFDGKKITVTGTLWNGNKIIDERLINPDGSLLFRVTINV

SEQ ID NO: 779 - DNA, 477 bp, Artificial Sequence
  Synthetic
atggtcttcacactcgaagatttcgttggggactggcgacagacagccgcctacaacctggaccaagtccttgaacagggaggtgtgtccagtttgtttcagaatctcgccgtgtccgtaactccgatccaaaggattgtcctgagcggtgaaaatgccctgaagatcgacatccatgtcatcatcccgtatgaaggtctgagcgccgaccaaatggcccagatcgaaaaaatttttaaggtggtgtaccctgtggatgatcatcactttaaggtgatcctgcactatggcacactggtaatcgacggggttacgccgaacgccatcgactatttcggacggccgtatgaaggcatcgccgtgttcgacggcaaaaagatcactgtaacagggaccctgtggaacggcaacaaaattatcgacgagcgcctgatcaaccccgacggctccctgctgttccgagtaaccatcaacgtt

SEQ ID NO: 780 - protein, 159 aa, Artificial Sequence
  Synthetic
MVFTLEDFVGDWRQTAAYNLDQVLEQGGVSSLFQNLAVSVTPIQRIVLSGENALKIDIHVIIPYEGLSADQMAQIEKIFKVVYPVDDHHFKVILHYGTLVIDGVTPNAIDYFGRPYEGIAVFDGKKITVTGTLWNGNKIIDERLINPDGSLLFRVTINV

SEQ ID NO: 781 - DNA, 477 bp, Artificial Sequence
  Synthetic
atggtcttcacactcgaagatttcgttggggactggcgacagacagccgcctacaacctggaccaagtccttgaacagggaggtgtgtccagtttgtttcagaatctcgccgtgtccgtaactccgatccaaaggattgtcctgagcggtgaaaatgccctgaagatcgacatccatgtcatcatcccgtatgaaggtctgagcgccgaccaaatggcccagatcgaaaaaatttttaaggtggtgtaccctgtggatgatcatcactttaaggtgatcctgcactatggcacactggtaatcgacggggttacgccgaactgcatcgactatttcggacggccgtatgaaggcatcgccgtgttcgacggcaaaaagatcactgtaacagggaccctgtggaacggcaacaaaattatcgacgagcgcctgatcaaccccgacggctccctgctgttccgagtaaccatcaacgtt

SEQ ID NO: 782 - protein, 159 aa, Artificial Sequence
  Synthetic
MVFTLEDFVGDWRQTAAYNLDQVLEQGGVSSLFQNLAVSVTPIQRIVLSGENALKIDIHVIIPYEGLSADQMAQIEKIFKVVYPVDDHHFKVILHYGTLVIDGVTPNCIDYFGRPYEGIAVFDGKKITVTGTLWNGNKIIDERLINPDGSLLFRVTINV

SEQ ID NO: 783 - DNA, 477 bp, Artificial Sequence
  Synthetic
atggtcttcacactcgaagatttcgttggggactggcgacagacagccgcctacaacctggaccaagtccttgaacagggaggtgtgtccagtttgtttcagaatctcgccgtgtccgtaactccgatccaaaggattgtcctgagcggtgaaaatgccctgaagatcgacatccatgtcatcatcccgtatgaaggtctgagcgccgaccaaatggcccagatcgaaaaaatttttaaggtggtgtaccctgtggatgatcatcactttaaggtgatcctgcactatggcacactggtaatcgacggggttacgccgaacgacatcgactatttcggacggccgtatgaaggcatcgccgtgttcgacggcaaaaagatcactgtaacagggaccctgtggaacggcaacaaaattatcgacgagcgcctgatcaaccccgacggctccctgctgttccgagtaaccatcaacgtt

SEQ ID NO: 784 - protein, 159 aa, Artificial Sequence
  Synthetic
MVFTLEDFVGDWRQTAAYNLDQVLEQGGVSSLFQNLAVSVTPIQRIVLSGENALKIDIHVIIPYEGLSADQMAQIEKIFKVVYPVDDHHFKVILHYGTLVIDGVTPNDIDYFGRPYEGIAVFDGKKITVTGTLWNGNKIIDERLINPDGSLLFRVTINV

SEQ ID NO: 785 - DNA, 477 bp, Artificial Sequence
  Synthetic
atggtcttcacactcgaagatttcgttggggactggcgacagacagccgcctacaacctggaccaagtccttgaacagggaggtgtgtccagtttgtttcagaatctcgccgtgtccgtaactccgatccaaaggattgtcctgagcggtgaaaatgccctgaagatcgacatccatgtcatcatcccgtatgaaggtctgagcgccgaccaaatggcccagatcgaaaaaatttttaaggtggtgtaccctgtggatgatcatcactttaaggtgatcctgcactatggcacactggtaatcgacggggttacgccgaacgagatcgactatttcggacggccgtatgaaggcatcgccgtgttcgacggcaaaaagatcactgtaacagggaccctgtggaacggcaacaaaattatcgacgagcgcctgatcaaccccgacggctccctgctgttccgagtaaccatcaacgtt

SEQ ID NO: 786 - protein, 159 aa, Artificial Sequence
  Synthetic
MVFTLEDFVGDWRQTAAYNLDQVLEQGGVSSLFQNLAVSVTPIQRIVLSGENALKIDIHVIIPYEGLSADQMAQIEKIFKVVYPVDDHHFKVILHYGTLVIDGVTPNEIDYFGRPYEGIAVFDGKKITVTGTLWNGNKIIDERLINPDGSLLFRVTINV

SEQ ID NO: 787 - DNA, 477 bp, Artificial Sequence
  Synthetic
atggtcttcacactcgaagatttcgttggggactggcgacagacagccgcctacaacctggaccaagtccttgaacagggaggtgtgtccagtttgtttcagaatctcgccgtgtccgtaactccgatccaaaggattgtcctgagcggtgaaaatgccctgaagatcgacatccatgtcatcatcccgtatgaaggtctgagcgccgaccaaatggcccagatcgaaaaaatttttaaggtggtgtaccctgtggatgatcatcactttaaggtgatcctgcactatggcacactggtaatcgacggggttacgccgaacttcatcgactatttcggacggccgtatgaaggcatcgccgtgttcgacggcaaaaagatcactgtaacagggaccctgtggaacggcaacaaaattatcgacgagcgcctgatcaaccccgacggctccctgctgttccgagtaaccatcaacgtt

SEQ ID NO: 788 - protein, 159 aa, Artificial Sequence
  Synthetic
MVFTLEDFVGDWRQTAAYNLDQVLEQGGVSSLFQNLAVSVTPIQRIVLSGENALKIDIHVIIPYEGLSADQMAQIEKIFKVVYPVDDHHFKVILHYGTLVIDGVTPNFIDYFGRPYEGIAVFDGKKITVTGTLWNGNKIIDERLINPDGSLLFRVTINV

SEQ ID NO: 789 - DNA, 477 bp, Artificial Sequence
  Synthetic
atggtcttcacactcgaagatttcgttggggactggcgacagacagccgcctacaacctggaccaagtccttgaacagggaggtgtgtccagtttgtttcagaatctcgccgtgtccgtaactccgatccaaaggattgtcctgagcggtgaaaatgccctgaagatcgacatccatgtcatcatcccgtatgaaggtctgagcgccgaccaaatggcccagatcgaaaaaatttttaaggtggtgtaccctgtggatgatcatcactttaaggtgatcctgcactatggcacactggtaatcgacggggttacgccgaacggcatcgactatttcggacggccgtatgaaggcatcgccgtgttcgacggcaaaaagatcactgtaacagggaccctgtggaacggcaacaaaattatcgacgagcgcctgatcaaccccgacggctccctgctgttccgagtaaccatcaacgtt

SEQ ID NO: 790 - protein, 159 aa, Artificial Sequence
  Synthetic
MVFTLEDFVGDWRQTAAYNLDQVLEQGGVSSLFQNLAVSVTPIQRIVLSGENALKIDIHVIIPYEGLSADQMAQIEKIFKVVYPVDDHHFKVILHYGTLVIDGVTPNGIDYFGRPYEGIAVFDGKKITVTGTLWNGNKIIDERLINPDGSLLFRVTINV

SEQ ID NO: 791 - DNA, 477 bp, Artificial Sequence
  Synthetic
atggtcttcacactcgaagatttcgttggggactggcgacagacagccgcctacaacctggaccaagtccttgaacagggaggtgtgtccagtttgtttcagaatctcgccgtgtccgtaactccgatccaaaggattgtcctgagcggtgaaaatgccctgaagatcgacatccatgtcatcatcccgtatgaaggtctgagcgccgaccaaatggcccagatcgaaaaaatttttaaggtggtgtaccctgtggatgatcatcactttaaggtgatcctgcactatggcacactggtaatcgacggggttacgccgaaccacatcgactatttcggacggccgtatgaaggcatcgccgtgttcgacggcaaaaagatcactgtaacagggaccctgtggaacggcaacaaaattatcgacgagcgcctgatcaaccccgacggctccctgctgttccgagtaaccatcaacgtt

SEQ ID NO: 792 - protein, 159 aa, Artificial Sequence
  Synthetic
MVFTLEDFVGDWRQTAAYNLDQVLEQGGVSSLFQNLAVSVTPIQRIVLSGENALKIDIHVIIPYEGLSADQMAQIEKIFKVVYPVDDHHFKVILHYGTLVIDGVTPNHIDYFGRPYEGIAVFDGKKITVTGTLWNGNKIIDERLINPDGSLLFRVTINV

SEQ ID NO: 793 - DNA, 477 bp, Artificial Sequence
  Synthetic
atggtcttcacactcgaagatttcgttggggactggcgacagacagccgcctacaacctggaccaagtccttgaacagggaggtgtgtccagtttgtttcagaatctcgccgtgtccgtaactccgatccaaaggattgtcctgagcggtgaaaatgccctgaagatcgacatccatgtcatcatcccgtatgaaggtctgagcgccgaccaaatggcccagatcgaaaaaatttttaaggtggtgtaccctgtggatgatcatcactttaaggtgatcctgcactatggcacactggtaatcgacggggttacgccgaacatcatcgactatttcggacggccgtatgaaggcatcgccgtgttcgacggcaaaaagatcactgtaacagggaccctgtggaacggcaacaaaattatcgacgagcgcctgatcaaccccgacggctccctgctgttccgagtaaccatcaacgtt

SEQ ID NO: 794 - protein, 159 aa, Artificial Sequence
  Synthetic
MVFTLEDFVGDWRQTAAYNLDQVLEQGGVSSLFQNLAVSVTPIQRIVLSGENALKIDIHVIIPYEGLSADQMAQIEKIFKVVYPVDDHHFKVILHYGTLVIDGVTPNIIDYFGRPYEGIAVFDGKKITVTGTLWNGNKIIDERLINPDGSLLFRVTINV

SEQ ID NO: 795 - DNA, 477 bp, Artificial Sequence
  Synthetic
atggtcttcacactcgaagatttcgttggggactggcgacagacagccgcctacaacctggaccaagtccttgaacagggaggtgtgtccagtttgtttcagaatctcgccgtgtccgtaactccgatccaaaggattgtcctgagcggtgaaaatgccctgaagatcgacatccatgtcatcatcccgtatgaaggtctgagcgccgaccaaatggcccagatcgaaaaaatttttaaggtggtgtaccctgtggatgatcatcactttaaggtgatcctgcactatggcacactggtaatcgacggggttacgccgaacaagatcgactatttcggacggccgtatgaaggcatcgccgtgttcgacggcaaaaagatcactgtaacagggaccctgtggaacggcaacaaaattatcgacgagcgcctgatcaaccccgacggctccctgctgttccgagtaaccatcaacgtt

SEQ ID NO: 796 - protein, 159 aa, Artificial Sequence
  Synthetic
MVFTLEDFVGDWRQTAAYNLDQVLEQGGVSSLFQNLAVSVTPIQRIVLSGENALKIDIHVIIPYEGLSADQMAQIEKIFKVVYPVDDHHFKVILHYGTLVIDGVTPNKIDYFGRPYEGIAVFDGKKITVTGTLWNGNKIIDERLINPDGSLLFRVTINV

SEQ ID NO: 797 - DNA, 477 bp, Artificial Sequence
  Synthetic
atggtcttcacactcgaagatttcgttggggactggcgacagacagccgcctacaacctggaccaagtccttgaacagggaggtgtgtccagtttgtttcagaatctcgccgtgtccgtaactccgatccaaaggattgtcctgagcggtgaaaatgccctgaagatcgacatccatgtcatcatcccgtatgaaggtctgagcgccgaccaaatggcccagatcgaaaaaatttttaaggtggtgtaccctgtggatgatcatcactttaaggtgatcctgcactatggcacactggtaatcgacggggttacgccgaacctgatcgactatttcggacggccgtatgaaggcatcgccgtgttcgacggcaaaaagatcactgtaacagggaccctgtggaacggcaacaaaattatcgacgagcgcctgatcaaccccgacggctccctgctgttccgagtaaccatcaacgtt

SEQ ID NO: 798 - protein, 159 aa, Artificial Sequence
  Synthetic
MVFTLEDFVGDWRQTAAYNLDQVLEQGGVSSLFQNLAVSVTPIQRIVLSGENALKIDIHVIIPYEGLSADQMAQIEKIFKVVYPVDDHHFKVILHYGTLVIDGVTPNLIDYFGRPYEGIAVFDGKKITVTGTLWNGNKIIDERLINPDGSLLFRVTINV

SEQ ID NO: 799 - DNA, 477 bp, Artificial Sequence
  Synthetic
atggtcttcacactcgaagatttcgttggggactggcgacagacagccgcctacaacctggaccaagtccttgaacagggaggtgtgtccagtttgtttcagaatctcgccgtgtccgtaactccgatccaaaggattgtcctgagcggtgaaaatgccctgaagatcgacatccatgtcatcatcccgtatgaaggtctgagcgccgaccaaatggcccagatcgaaaaaatttttaaggtggtgtaccctgtggatgatcatcactttaaggtgatcctgcactatggcacactggtaatcgacggggttacgccgaacaacatcgactatttcggacggccgtatgaaggcatcgccgtgttcgacggcaaaaagatcactgtaacagggaccctgtggaacggcaacaaaattatcgacgagcgcctgatcaaccccgacggctccctgctgttccgagtaaccatcaacgtt

SEQ ID NO: 800 - protein, 159 aa, Artificial Sequence
  Synthetic
MVFTLEDFVGDWRQTAAYNLDQVLEQGGVSSLFQNLAVSVTPIQRIVLSGENALKIDIHVIIPYEGLSADQMAQIEKIFKVVYPVDDHHFKVILHYGTLVIDGVTPNNIDYFGRPYEGIAVFDGKKITVTGTLWNGNKIIDERLINPDGSLLFRVTINV

SEQ ID NO: 801 - DNA, 477 bp, Artificial Sequence
  Synthetic
atggtcttcacactcgaagatttcgttggggactggcgacagacagccgcctacaacctggaccaagtccttgaacagggaggtgtgtccagtttgtttcagaatctcgccgtgtccgtaactccgatccaaaggattgtcctgagcggtgaaaatgccctgaagatcgacatccatgtcatcatcccgtatgaaggtctgagcgccgaccaaatggcccagatcgaaaaaatttttaaggtggtgtaccctgtggatgatcatcactttaaggtgatcctgcactatggcacactggtaatcgacggggttacgccgaaccccatcgactatttcggacggccgtatgaaggcatcgccgtgttcgacggcaaaaagatcactgtaacagggaccctgtggaacggcaacaaaattatcgacgagcgcctgatcaaccccgacggctccctgctgttccgagtaaccatcaacgtt

SEQ ID NO: 802 - protein, 159 aa, Artificial Sequence
  Synthetic
MVFTLEDFVGDWRQTAAYNLDQVLEQGGVSSLFQNLAVSVTPIQRIVLSGENALKIDIHVIIPYEGLSADQMAQIEKIFKVVYPVDDHHFKVILHYGTLVIDGVTPNPIDYFGRPYEGIAVFDGKKITVTGTLWNGNKIIDERLINPDGSLLFRVTINV

SEQ ID NO: 803 - DNA, 477 bp, Artificial Sequence
  Synthetic
atggtcttcacactcgaagatttcgttggggactggcgacagacagccgcctacaacctggaccaagtccttgaacagggaggtgtgtccagtttgtttcagaatctcgccgtgtccgtaactccgatccaaaggattgtcctgagcggtgaaaatgccctgaagatcgacatccatgtcatcatcccgtatgaaggtctgagcgccgaccaaatggcccagatcgaaaaaatttttaaggtggtgtaccctgtggatgatcatcactttaaggtgatcctgcactatggcacactggtaatcgacggggttacgccgaaccagatcgactatttcggacggccgtatgaaggcatcgccgtgttcgacggcaaaaagatcactgtaacagggaccctgtggaacggcaacaaaattatcgacgagcgcctgatcaaccccgacggctccctgctgttccgagtaaccatcaacgtt

SEQ ID NO: 804 - protein, 159 aa, Artificial Sequence
  Synthetic
MVFTLEDFVGDWRQTAAYNLDQVLEQGGVSSLFQNLAVSVTPIQRIVLSGENALKIDIHVIIPYEGLSADQMAQIEKIFKVVYPVDDHHFKVILHYGTLVIDGVTPNQIDYFGRPYEGIAVFDGKKITVTGTLWNGNKIIDERLINPDGSLLFRVTINV

SEQ ID NO: 805 - DNA, 477 bp, Artificial Sequence
  Synthetic
atggtcttcacactcgaagatttcgttggggactggcgacagacagccgcctacaacctggaccaagtccttgaacagggaggtgtgtccagtttgtttcagaatctcgccgtgtccgtaactccgatccaaaggattgtcctgagcggtgaaaatgccctgaagatcgacatccatgtcatcatcccgtatgaaggtctgagcgccgaccaaatggcccagatcgaaaaaatttttaaggtggtgtaccctgtggatgatcatcactttaaggtgatcctgcactatggcacactggtaatcgacggggttacgccgaaccggatcgactatttcggacggccgtatgaaggcatcgccgtgttcgacggcaaaaagatcactgtaacagggaccctgtggaacggcaacaaaattatcgacgagcgcctgatcaaccccgacggctccctgctgttccgagtaaccatcaacgtt

SEQ ID NO: 806 - protein, 159 aa, Artificial Sequence
  Synthetic
MVFTLEDFVGDWRQTAAYNLDQVLEQGGVSSLFQNLAVSVTPIQRIVLSGENALKIDIHVIIPYEGLSADQMAQIEKIFKVVYPVDDHHFKVILHYGTLVIDGVTPNRIDYFGRPYEGIAVFDGKKITVTGTLWNGNKIIDERLINPDGSLLFRVTINV

SEQ ID NO: 807 - DNA, 477 bp, Artificial Sequence
  Synthetic
atggtcttcacactcgaagatttcgttggggactggcgacagacagccgcctacaacctggaccaagtccttgaacagggaggtgtgtccagtttgtttcagaatctcgccgtgtccgtaactccgatccaaaggattgtcctgagcggtgaaaatgccctgaagatcgacatccatgtcatcatcccgtatgaaggtctgagcgccgaccaaatggcccagatcgaaaaaatttttaaggtggtgtaccctgtggatgatcatcactttaaggtgatcctgcactatggcacactggtaatcgacggggttacgccgaacagcatcgactatttcggacggccgtatgaaggcatcgccgtgttcgacggcaaaaagatcactgtaacagggaccctgtggaacggcaacaaaattatcgacgagcgcctgatcaaccccgacggctccctgctgttccgagtaaccatcaacgtt

SEQ ID NO: 808 - protein, 159 aa, Artificial Sequence
  Synthetic
MVFTLEDFVGDWRQTAAYNLDQVLEQGGVSSLFQNLAVSVTPIQRIVLSGENALKIDIHVIIPYEGLSADQMAQIEKIFKVVYPVDDHHFKVILHYGTLVIDGVTPNSIDYFGRPYEGIAVFDGKKITVTGTLWNGNKIIDERLINPDGSLLFRVTINV

SEQ ID NO: 809 - DNA, 477 bp, Artificial Sequence
  Synthetic
atggtcttcacactcgaagatttcgttggggactggcgacagacagccgcctacaacctggaccaagtccttgaacagggaggtgtgtccagtttgtttcagaatctcgccgtgtccgtaactccgatccaaaggattgtcctgagcggtgaaaatgccctgaagatcgacatccatgtcatcatcccgtatgaaggtctgagcgccgaccaaatggcccagatcgaaaaaatttttaaggtggtgtaccctgtggatgatcatcactttaaggtgatcctgcactatggcacactggtaatcgacggggttacgccgaacaccatcgactatttcggacggccgtatgaaggcatcgccgtgttcgacggcaaaaagatcactgtaacagggaccctgtggaacggcaacaaaattatcgacgagcgcctgatcaaccccgacggctccctgctgttccgagtaaccatcaacgtt

SEQ ID NO: 810 - protein, 159 aa, Artificial Sequence
  Synthetic
MVFTLEDFVGDWRQTAAYNLDQVLEQGGVSSLFQNLAVSVTPIQRIVLSGENALKIDIHVIIPYEGLSADQMAQIEKIFKVVYPVDDHHFKVILHYGTLVIDGVTPNTIDYFGRPYEGIAVFDGKKITVTGTLWNGNKIIDERLINPDGSLLFRVTINV

SEQ ID NO: 811 - DNA, 477 bp, Artificial Sequence
  Synthetic
atggtcttcacactcgaagatttcgttggggactggcgacagacagccgcctacaacctggaccaagtccttgaacagggaggtgtgtccagtttgtttcagaatctcgccgtgtccgtaactccgatccaaaggattgtcctgagcggtgaaaatgccctgaagatcgacatccatgtcatcatcccgtatgaaggtctgagcgccgaccaaatggcccagatcgaaaaaatttttaaggtggtgtaccctgtggatgatcatcactttaaggtgatcctgcactatggcacactggtaatcgacggggttacgccgaacgtgatcgactatttcggacggccgtatgaaggcatcgccgtgttcgacggcaaaaagatcactgtaacagggaccctgtggaacggcaacaaaattatcgacgagcgcctgatcaaccccgacggctccctgctgttccgagtaaccatcaacgtt

SEQ ID NO: 812 - protein, 159 aa, Artificial Sequence
  Synthetic
MVFTLEDFVGDWRQTAAYNLDQVLEQGGVSSLFQNLAVSVTPIQRIVLSGENALKIDIHVIIPYEGLSADQMAQIEKIFKVVYPVDDHHFKVILHYGTLVIDGVTPNVIDYFGRPYEGIAVFDGKKITVTGTLWNGNKIIDERLINPDGSLLFRVTINV

SEQ ID NO: 813 - DNA, 477 bp, Artificial Sequence
  Synthetic
atggtcttcacactcgaagatttcgttggggactggcgacagacagccgcctacaacctggaccaagtccttgaacagggaggtgtgtccagtttgtttcagaatctcgccgtgtccgtaactccgatccaaaggattgtcctgagcggtgaaaatgccctgaagatcgacatccatgtcatcatcccgtatgaaggtctgagcgccgaccaaatggcccagatcgaaaaaatttttaaggtggtgtaccctgtggatgatcatcactttaaggtgatcctgcactatggcacactggtaatcgacggggttacgccgaactggatcgactatttcggacggccgtatgaaggcatcgccgtgttcgacggcaaaaagatcactgtaacagggaccctgtggaacggcaacaaaattatcgacgagcgcctgatcaaccccgacggctccctgctgttccgagtaaccatcaacgtt

SEQ ID NO: 814 - protein, 159 aa, Artificial Sequence
  Synthetic
MVFTLEDFVGDWRQTAAYNLDQVLEQGGVSSLFQNLAVSVTPIQRIVLSGENALKIDIHVIIPYEGLSADQMAQIEKIFKVVYPVDDHHFKVILHYGTLVIDGVTPNWIDYFGRPYEGIAVFDGKKITVTGTLWNGNKIIDERLINPDGSLLFRVTINV

SEQ ID NO: 815 - DNA, 477 bp, Artificial Sequence
  Synthetic
atggtcttcacactcgaagatttcgttggggactggcgacagacagccgcctacaacctggaccaagtccttgaacagggaggtgtgtccagtttgtttcagaatctcgccgtgtccgtaactccgatccaaaggattgtcctgagcggtgaaaatgccctgaagatcgacatccatgtcatcatcccgtatgaaggtctgagcgccgaccaaatggcccagatcgaaaaaatttttaaggtggtgtaccctgtggatgatcatcactttaaggtgatcctgcactatggcacactggtaatcgacggggttacgccgaactacatcgactatttcggacggccgtatgaaggcatcgccgtgttcgacggcaaaaagatcactgtaacagggaccctgtggaacggcaacaaaattatcgacgagcgcctgatcaaccccgacggctccctgctgttccgagtaaccatcaacgtt

SEQ ID NO: 816 - protein, 159 aa, Artificial Sequence
  Synthetic
MVFTLEDFVGDWRQTAAYNLDQVLEQGGVSSLFQNLAVSVTPIQRIVLSGENALKIDIHVIIPYEGLSADQMAQIEKIFKVVYPVDDHHFKVILHYGTLVIDGVTPNYIDYFGRPYEGIAVFDGKKITVTGTLWNGNKIIDERLINPDGSLLFRVTINV

SEQ ID NO: 817 - DNA, 477 bp, Artificial Sequence
  Synthetic
atggtcttcacactcgaagatttcgttggggactggcgacagacagccgcctacaacctggaccaagtccttgaacagggaggtgtgtccagtttgtttcagaatctcgccgtgtccgtaactccgatccaaaggattgtcctgagcggtgaaaatgccctgaagatcgacatccatgtcatcatcccgtatgaaggtctgagcgccgaccaaatggcccagatcgaaaaaatttttaaggtggtgtaccctgtggatgatcatcactttaaggtgatcctgcactatggcacactggtaatcgacggggttacgccgaacatgatcgactatttcggacggccgtatgaaggcatcgccgtgttcgacggcaaaaagatcactgtaacagggaccctgtggaacggcaacaaaattatcgacgagcgcctgatcaaccccgacggctccgccctgttccgagtaaccatcaacgtt

SEQ ID NO: 818 - protein, 159 aa, Artificial Sequence
  Synthetic
MVFTLEDFVGDWRQTAAYNLDQVLEQGGVSSLFQNLAVSVTPIQRIVLSGENALKIDIHVIIPYEGLSADQMAQIEKIFKVVYPVDDHHFKVILHYGTLVIDGVTPNMIDYFGRPYEGIAVFDGKKITVTGTLWNGNKIIDERLINPDGSALFRVTINV

SEQ ID NO: 819 - DNA, 477 bp, Artificial Sequence
  Synthetic
atggtcttcacactcgaagatttcgttggggactggcgacagacagccgcctacaacctggaccaagtccttgaacagggaggtgtgtccagtttgtttcagaatctcgccgtgtccgtaactccgatccaaaggattgtcctgagcggtgaaaatgccctgaagatcgacatccatgtcatcatcccgtatgaaggtctgagcgccgaccaaatggcccagatcgaaaaaatttttaaggtggtgtaccctgtggatgatcatcactttaaggtgatcctgcactatggcacactggtaatcgacggggttacgccgaacatgatcgactatttcggacggccgtatgaaggcatcgccgtgttcgacggcaaaaagatcactgtaacagggaccctgtggaacggcaacaaaattatcgacgagcgcctgatcaaccccgacggctcctgcctgttccgagtaaccatcaacgtt

SEQ ID NO: 820 - protein, 159 aa, Artificial Sequence
  Synthetic
MVFTLEDFVGDWRQTAAYNLDQVLEQGGVSSLFQNLAVSVTPIQRIVLSGENALKIDIHVIIPYEGLSADQMAQIEKIFKVVYPVDDHHFKVILHYGTLVIDGVTPNMIDYFGRPYEGIAVFDGKKITVTGTLWNGNKIIDERLINPDGSCLFRVTINV

SEQ ID NO: 821 - DNA, 477 bp, Artificial Sequence
  Synthetic
atggtcttcacactcgaagatttcgttggggactggcgacagacagccgcctacaacctggaccaagtccttgaacagggaggtgtgtccagtttgtttcagaatctcgccgtgtccgtaactccgatccaaaggattgtcctgagcggtgaaaatgccctgaagatcgacatccatgtcatcatcccgtatgaaggtctgagcgccgaccaaatggcccagatcgaaaaaatttttaaggtggtgtaccctgtggatgatcatcactttaaggtgatcctgcactatggcacactggtaatcgacggggttacgccgaacatgatcgactatttcggacggccgtatgaaggcatcgccgtgttcgacggcaaaaagatcactgtaacagggaccctgtggaacggcaacaaaattatcgacgagcgcctgatcaaccccgacggctccgacctgttccgagtaaccatcaacgtt

SEQ ID NO: 822 - protein, 159 aa, Artificial Sequence
  Synthetic
MVFTLEDFVGDWRQTAAYNLDQVLEQGGVSSLFQNLAVSVTPIQRIVLSGENALKIDIHVIIPYEGLSADQMAQIEKIFKVVYPVDDHHFKVILHYGTLVIDGVTPNMIDYFGRPYEGIAVFDGKKITVTGTLWNGNKIIDERLINPDGSDLFRVTINV

SEQ ID NO: 823 - DNA, 477 bp, Artificial Sequence
  Synthetic
atggtcttcacactcgaagatttcgttggggactggcgacagacagccgcctacaacctggaccaagtccttgaacagggaggtgtgtccagtttgtttcagaatctcgccgtgtccgtaactccgatccaaaggattgtcctgagcggtgaaaatgccctgaagatcgacatccatgtcatcatcccgtatgaaggtctgagcgccgaccaaatggcccagatcgaaaaaatttttaaggtggtgtaccctgtggatgatcatcactttaaggtgatcctgcactatggcacactggtaatcgacggggttacgccgaacatgatcgactatttcggacggccgtatgaaggcatcgccgtgttcgacggcaaaaagatcactgtaacagggaccctgtggaacggcaacaaaattatcgacgagcgcctgatcaaccccgacggctccgagctgttccgagtaaccatcaacgtt

SEQ ID NO: 824 - protein, 159 aa, Artificial Sequence
  Synthetic
MVFTLEDFVGDWRQTAAYNLDQVLEQGGVSSLFQNLAVSVTPIQRIVLSGENALKIDIHVIIPYEGLSADQMAQIEKIFKVVYPVDDHHFKVILHYGTLVIDGVTPNMIDYFGRPYEGIAVFDGKKITVTGTLWNGNKIIDERLINPDGSELFRVTINV

SEQ ID NO: 825 - DNA, 477 bp, Artificial Sequence
  Synthetic
atggtcttcacactcgaagatttcgttggggactggcgacagacagccgcctacaacctggaccaagtccttgaacagggaggtgtgtccagtttgtttcagaatctcgccgtgtccgtaactccgatccaaaggattgtcctgagcggtgaaaatgccctgaagatcgacatccatgtcatcatcccgtatgaaggtctgagcgccgaccaaatggcccagatcgaaaaaatttttaaggtggtgtaccctgtggatgatcatcactttaaggtgatcctgcactatggcacactggtaatcgacggggttacgccgaacatgatcgactatttcggacggccgtatgaaggcatcgccgtgttcgacggcaaaaagatcactgtaacagggaccctgtggaacggcaacaaaattatcgacgagcgcctgatcaaccccgacggctccttcctgttccgagtaaccatcaacgtt

SEQ ID NO: 826 - protein, 159 aa, Artificial Sequence
  Synthetic
MVFTLEDFVGDWRQTAAYNLDQVLEQGGVSSLFQNLAVSVTPIQRIVLSGENALKIDIHVIIPYEGLSADQMAQIEKIFKVVYPVDDHHFKVILHYGTLVIDGVTPNMIDYFGRPYEGIAVFDGKKITVTGTLWNGNKIIDERLINPDGSFLFRVTINV

SEQ ID NO: 827 - DNA, 477 bp, Artificial Sequence
  Synthetic
atggtcttcacactcgaagatttcgttggggactggcgacagacagccgcctacaacctggaccaagtccttgaacagggaggtgtgtccagtttgtttcagaatctcgccgtgtccgtaactccgatccaaaggattgtcctgagcggtgaaaatgccctgaagatcgacatccatgtcatcatcccgtatgaaggtctgagcgccgaccaaatggcccagatcgaaaaaatttttaaggtggtgtaccctgtggatgatcatcactttaaggtgatcctgcactatggcacactggtaatcgacggggttacgccgaacatgatcgactatttcggacggccgtatgaaggcatcgccgtgttcgacggcaaaaagatcactgtaacagggaccctgtggaacggcaacaaaattatcgacgagcgcctgatcaaccccgacggctccggcctgttccgagtaaccatcaacgtt

SEQ ID NO: 828 - protein, 159 aa, Artificial Sequence
  Synthetic
MVFTLEDFVGDWRQTAAYNLDQVLEQGGVSSLFQNLAVSVTPIQRIVLSGENALKIDIHVIIPYEGLSADQMAQIEKIFKVVYPVDDHHFKVILHYGTLVIDGVTPNMIDYFGRPYEGIAVFDGKKITVTGTLWNGNKIIDERLINPDGSGLFRVTINV

SEQ ID NO: 829 - DNA, 477 bp, Artificial Sequence
  Synthetic
atggtcttcacactcgaagatttcgttggggactggcgacagacagccgcctacaacctggaccaagtccttgaacagggaggtgtgtccagtttgtttcagaatctcgccgtgtccgtaactccgatccaaaggattgtcctgagcggtgaaaatgccctgaagatcgacatccatgtcatcatcccgtatgaaggtctgagcgccgaccaaatggcccagatcgaaaaaatttttaaggtggtgtaccctgtggatgatcatcactttaaggtgatcctgcactatggcacactggtaatcgacggggttacgccgaacatgatcgactatttcggacggccgtatgaaggcatcgccgtgttcgacggcaaaaagatcactgtaacagggaccctgtggaacggcaacaaaattatcgacgagcgcctgatcaaccccgacggctcccacctgttccgagtaaccatcaacgtt

SEQ ID NO: 830 - protein, 159 aa, Artificial Sequence
  Synthetic
MVFTLEDFVGDWRQTAAYNLDQVLEQGGVSSLFQNLAVSVTPIQRIVLSGENALKIDIHVIIPYEGLSADQMAQIEKIFKVVYPVDDHHFKVILHYGTLVIDGVTPNMIDYFGRPYEGIAVFDGKKITVTGTLWNGNKIIDERLINPDGSHLFRVTINV

SEQ ID NO: 831 - DNA, 477 bp, Artificial Sequence
  Synthetic
atggtcttcacactcgaagatttcgttggggactggcgacagacagccgcctacaacctggaccaagtccttgaacagggaggtgtgtccagtttgtttcagaatctcgccgtgtccgtaactccgatccaaaggattgtcctgagcggtgaaaatgccctgaagatcgacatccatgtcatcatcccgtatgaaggtctgagcgccgaccaaatggcccagatcgaaaaaatttttaaggtggtgtaccctgtggatgatcatcactttaaggtgatcctgcactatggcacactggtaatcgacggggttacgccgaacatgatcgactatttcggacggccgtatgaaggcatcgccgtgttcgacggcaaaaagatcactgtaacagggaccctgtggaacggcaacaaaattatcgacgagcgcctgatcaaccccgacggctccatcctgttccgagtaaccatcaacgtt

SEQ ID NO: 832 - protein, 159 aa, Artificial Sequence
  Synthetic
MVFTLEDFVGDWRQTAAYNLDQVLEQGGVSSLFQNLAVSVTPIQRIVLSGENALKIDIHVIIPYEGLSADQMAQIEKIFKVVYPVDDHHFKVILHYGTLVIDGVTPNMIDYFGRPYEGIAVFDGKKITVTGTLWNGNKIIDERLINPDGSILFRVTINV

SEQ ID NO: 833 - DNA, 477 bp, Artificial Sequence
  Synthetic
atggtcttcacactcgaagatttcgttggggactggcgacagacagccgcctacaacctggaccaagtccttgaacagggaggtgtgtccagtttgtttcagaatctcgccgtgtccgtaactccgatccaaaggattgtcctgagcggtgaaaatgccctgaagatcgacatccatgtcatcatcccgtatgaaggtctgagcgccgaccaaatggcccagatcgaaaaaatttttaaggtggtgtaccctgtggatgatcatcactttaaggtgatcctgcactatggcacactggtaatcgacggggttacgccgaacatgatcgactatttcggacggccgtatgaaggcatcgccgtgttcgacggcaaaaagatcactgtaacagggaccctgtggaacggcaacaaaattatcgacgagcgcctgatcaaccccgacggctccaagctgttccgagtaaccatcaacgtt

SEQ ID NO: 834 - protein, 159 aa, Artificial Sequence
  Synthetic
MVFTLEDFVGDWRQTAAYNLDQVLEQGGVSSLFQNLAVSVTPIQRIVLSGENALKIDIHVIIPYEGLSADQMAQIEKIFKVVYPVDDHHFKVILHYGTLVIDGVTPNMIDYFGRPYEGIAVFDGKKITVTGTLWNGNKIIDERLINPDGSKLFRVTINV

SEQ ID NO: 835 - DNA, 477 bp, Artificial Sequence
  Synthetic
atggtcttcacactcgaagatttcgttggggactggcgacagacagccgcctacaacctggaccaagtccttgaacagggaggtgtgtccagtttgtttcagaatctcgccgtgtccgtaactccgatccaaaggattgtcctgagcggtgaaaatgccctgaagatcgacatccatgtcatcatcccgtatgaaggtctgagcgccgaccaaatggcccagatcgaaaaaatttttaaggtggtgtaccctgtggatgatcatcactttaaggtgatcctgcactatggcacactggtaatcgacggggttacgccgaacatgatcgactatttcggacggccgtatgaaggcatcgccgtgttcgacggcaaaaagatcactgtaacagggaccctgtggaacggcaacaaaattatcgacgagcgcctgatcaaccccgacggctccatgctgttccgagtaaccatcaacgtt

SEQ ID NO: 836 - protein, 159 aa, Artificial Sequence
  Synthetic
MVFTLEDFVGDWRQTAAYNLDQVLEQGGVSSLFQNLAVSVTPIQRIVLSGENALKIDIHVIIPYEGLSADQMAQIEKIFKVVYPVDDHHFKVILHYGTLVIDGVTPNMIDYFGRPYEGIAVFDGKKITVTGTLWNGNKIIDERLINPDGSMLFRVTINV

SEQ ID NO: 837 - DNA, 477 bp, Artificial Sequence
  Synthetic
atggtcttcacactcgaagatttcgttggggactggcgacagacagccgcctacaacctggaccaagtccttgaacagggaggtgtgtccagtttgtttcagaatctcgccgtgtccgtaactccgatccaaaggattgtcctgagcggtgaaaatgccctgaagatcgacatccatgtcatcatcccgtatgaaggtctgagcgccgaccaaatggcccagatcgaaaaaatttttaaggtggtgtaccctgtggatgatcatcactttaaggtgatcctgcactatggcacactggtaatcgacggggttacgccgaacatgatcgactatttcggacggccgtatgaaggcatcgccgtgttcgacggcaaaaagatcactgtaacagggaccctgtggaacggcaacaaaattatcgacgagcgcctgatcaaccccgacggctccaacctgttccgagtaaccatcaacgtt

SEQ ID NO: 838 - protein, 159 aa, Artificial Sequence
  Synthetic
MVFTLEDFVGDWRQTAAYNLDQVLEQGGVSSLFQNLAVSVTPIQRIVLSGENALKIDIHVIIPYEGLSADQMAQIEKIFKVVYPVDDHHFKVILHYGTLVIDGVTPNMIDYFGRPYEGIAVFDGKKITVTGTLWNGNKIIDERLINPDGSNLFRVTINV

SEQ ID NO: 839 - DNA, 477 bp, Artificial Sequence
  Synthetic
atggtcttcacactcgaagatttcgttggggactggcgacagacagccgcctacaacctggaccaagtccttgaacagggaggtgtgtccagtttgtttcagaatctcgccgtgtccgtaactccgatccaaaggattgtcctgagcggtgaaaatgccctgaagatcgacatccatgtcatcatcccgtatgaaggtctgagcgccgaccaaatggcccagatcgaaaaaatttttaaggtggtgtaccctgtggatgatcatcactttaaggtgatcctgcactatggcacactggtaatcgacggggttacgccgaacatgatcgactatttcggacggccgtatgaaggcatcgccgtgttcgacggcaaaaagatcactgtaacagggaccctgtggaacggcaacaaaattatcgacgagcgcctgatcaaccccgacggctcccccctgttccgagtaaccatcaacgtt

SEQ ID NO: 840 - protein, 159 aa, Artificial Sequence
  Synthetic
MVFTLEDFVGDWRQTAAYNLDQVLEQGGVSSLFQNLAVSVTPIQRIVLSGENALKIDIHVIIPYEGLSADQMAQIEKIFKVVYPVDDHHFKVILHYGTLVIDGVTPNMIDYFGRPYEGIAVFDGKKITVTGTLWNGNKIIDERLINPDGSPLFRVTINV

SEQ ID NO: 841 - DNA, 477 bp, Artificial Sequence
  Synthetic
atggtcttcacactcgaagatttcgttggggactggcgacagacagccgcctacaacctggaccaagtccttgaacagggaggtgtgtccagtttgtttcagaatctcgccgtgtccgtaactccgatccaaaggattgtcctgagcggtgaaaatgccctgaagatcgacatccatgtcatcatcccgtatgaaggtctgagcgccgaccaaatggcccagatcgaaaaaatttttaaggtggtgtaccctgtggatgatcatcactttaaggtgatcctgcactatggcacactggtaatcgacggggttacgccgaacatgatcgactatttcggacggccgtatgaaggcatcgccgtgttcgacggcaaaaagatcactgtaacagggaccctgtggaacggcaacaaaattatcgacgagcgcctgatcaaccccgacggctcccagctgttccgagtaaccatcaacgtt

SEQ ID NO: 842 - protein, 159 aa, Artificial Sequence
  Synthetic
MVFTLEDFVGDWRQTAAYNLDQVLEQGGVSSLFQNLAVSVTPIQRIVLSGENALKIDIHVIIPYEGLSADQMAQIEKIFKVVYPVDDHHFKVILHYGTLVIDGVTPNMIDYFGRPYEGIAVFDGKKITVTGTLWNGNKIIDERLINPDGSQLFRVTINV

SEQ ID NO: 843 - DNA, 477 bp, Artificial Sequence
  Synthetic
atggtcttcacactcgaagatttcgttggggactggcgacagacagccgcctacaacctggaccaagtccttgaacagggaggtgtgtccagtttgtttcagaatctcgccgtgtccgtaactccgatccaaaggattgtcctgagcggtgaaaatgccctgaagatcgacatccatgtcatcatcccgtatgaaggtctgagcgccgaccaaatggcccagatcgaaaaaatttttaaggtggtgtaccctgtggatgatcatcactttaaggtgatcctgcactatggcacactggtaatcgacggggttacgccgaacatgatcgactatttcggacggccgtatgaaggcatcgccgtgttcgacggcaaaaagatcactgtaacagggaccctgtggaacggcaacaaaattatcgacgagcgcctgatcaaccccgacggctcccggctgttccgagtaaccatcaacgtt

SEQ ID NO: 844 - protein, 159 aa, Artificial Sequence
  Synthetic
MVFTLEDFVGDWRQTAAYNLDQVLEQGGVSSLFQNLAVSVTPIQRIVLSGENALKIDIHVIIPYEGLSADQMAQIEKIFKVVYPVDDHHFKVILHYGTLVIDGVTPNMIDYFGRPYEGIAVFDGKKITVTGTLWNGNKIIDERLINPDGSRLFRVTINV

SEQ ID NO: 845 - DNA, 477 bp, Artificial Sequence
  Synthetic
atggtcttcacactcgaagatttcgttggggactggcgacagacagccgcctacaacctggaccaagtccttgaacagggaggtgtgtccagtttgtttcagaatctcgccgtgtccgtaactccgatccaaaggattgtcctgagcggtgaaaatgccctgaagatcgacatccatgtcatcatcccgtatgaaggtctgagcgccgaccaaatggcccagatcgaaaaaatttttaaggtggtgtaccctgtggatgatcatcactttaaggtgatcctgcactatggcacactggtaatcgacggggttacgccgaacatgatcgactatttcggacggccgtatgaaggcatcgccgtgttcgacggcaaaaagatcactgtaacagggaccctgtggaacggcaacaaaattatcgacgagcgcctgatcaaccccgacggctccagcctgttccgagtaaccatcaacgtt

SEQ ID NO: 846 - protein, 159 aa, Artificial Sequence
  Synthetic
MVFTLEDFVGDWRQTAAYNLDQVLEQGGVSSLFQNLAVSVTPIQRIVLSGENALKIDIHVIIPYEGLSADQMAQIEKIFKVVYPVDDHHFKVILHYGTLVIDGVTPNMIDYFGRPYEGIAVFDGKKITVTGTLWNGNKIIDERLINPDGSSLFRVTINV

SEQ ID NO: 847 - DNA, 477 bp, Artificial Sequence
  Synthetic
atggtcttcacactcgaagatttcgttggggactggcgacagacagccgcctacaacctggaccaagtccttgaacagggaggtgtgtccagtttgtttcagaatctcgccgtgtccgtaactccgatccaaaggattgtcctgagcggtgaaaatgccctgaagatcgacatccatgtcatcatcccgtatgaaggtctgagcgccgaccaaatggcccagatcgaaaaaatttttaaggtggtgtaccctgtggatgatcatcactttaaggtgatcctgcactatggcacactggtaatcgacggggttacgccgaacatgatcgactatttcggacggccgtatgaaggcatcgccgtgttcgacggcaaaaagatcactgtaacagggaccctgtggaacggcaacaaaattatcgacgagcgcctgatcaaccccgacggctccaccctgttccgagtaaccatcaacgtt

SEQ ID NO: 848 - protein, 159 aa, Artificial Sequence
  Synthetic
MVFTLEDFVGDWRQTAAYNLDQVLEQGGVSSLFQNLAVSVTPIQRIVLSGENALKIDIHVIIPYEGLSADQMAQIEKIFKVVYPVDDHHFKVILHYGTLVIDGVTPNMIDYFGRPYEGIAVFDGKKITVTGTLWNGNKIIDERLINPDGSTLFRVTINV

SEQ ID NO: 849 - DNA, 477 bp, Artificial Sequence
  Synthetic
atggtcttcacactcgaagatttcgttggggactggcgacagacagccgcctacaacctggaccaagtccttgaacagggaggtgtgtccagtttgtttcagaatctcgccgtgtccgtaactccgatccaaaggattgtcctgagcggtgaaaatgccctgaagatcgacatccatgtcatcatcccgtatgaaggtctgagcgccgaccaaatggcccagatcgaaaaaatttttaaggtggtgtaccctgtggatgatcatcactttaaggtgatcctgcactatggcacactggtaatcgacggggttacgccgaacatgatcgactatttcggacggccgtatgaaggcatcgccgtgttcgacggcaaaaagatcactgtaacagggaccctgtggaacggcaacaaaattatcgacgagcgcctgatcaaccccgacggctccgtgctgttccgagtaaccatcaacgtt

SEQ ID NO: 850 - protein, 159 aa, Artificial Sequence
  Synthetic
MVFTLEDFVGDWRQTAAYNLDQVLEQGGVSSLFQNLAVSVTPIQRIVLSGENALKIDIHVIIPYEGLSADQMAQIEKIFKVVYPVDDHHFKVILHYGTLVIDGVTPNMIDYFGRPYEGIAVFDGKKITVTGTLWNGNKIIDERLINPDGSVLFRVTINV

SEQ ID NO: 851 - DNA, 477 bp, Artificial Sequence
  Synthetic
atggtcttcacactcgaagatttcgttggggactggcgacagacagccgcctacaacctggaccaagtccttgaacagggaggtgtgtccagtttgtttcagaatctcgccgtgtccgtaactccgatccaaaggattgtcctgagcggtgaaaatgccctgaagatcgacatccatgtcatcatcccgtatgaaggtctgagcgccgaccaaatggcccagatcgaaaaaatttttaaggtggtgtaccctgtggatgatcatcactttaaggtgatcctgcactatggcacactggtaatcgacggggttacgccgaacatgatcgactatttcggacggccgtatgaaggcatcgccgtgttcgacggcaaaaagatcactgtaacagggaccctgtggaacggcaacaaaattatcgacgagcgcctgatcaaccccgacggctcctggctgttccgagtaaccatcaacgtt

SEQ ID NO: 852 - protein, 159 aa, Artificial Sequence
  Synthetic
MVFTLEDFVGDWRQTAAYNLDQVLEQGGVSSLFQNLAVSVTPIQRIVLSGENALKIDIHVIIPYEGLSADQMAQIEKIFKVVYPVDDHHFKVILHYGTLVIDGVTPNMIDYFGRPYEGIAVFDGKKITVTGTLWNGNKIIDERLINPDGSWLFRVTINV

SEQ ID NO: 853 - DNA, 477 bp, Artificial Sequence
  Synthetic
atggtcttcacactcgaagatttcgttggggactggcgacagacagccgcctacaacctggaccaagtccttgaacagggaggtgtgtccagtttgtttcagaatctcgccgtgtccgtaactccgatccaaaggattgtcctgagcggtgaaaatgccctgaagatcgacatccatgtcatcatcccgtatgaaggtctgagcgccgaccaaatggcccagatcgaaaaaatttttaaggtggtgtaccctgtggatgatcatcactttaaggtgatcctgcactatggcacactggtaatcgacggggttacgccgaacatgatcgactatttcggacggccgtatgaaggcatcgccgtgttcgacggcaaaaagatcactgtaacagggaccctgtggaacggcaacaaaattatcgacgagcgcctgatcaaccccgacggctcctacctgttccgagtaaccatcaacgtt

SEQ ID NO: 854 - protein, 159 aa, Artificial Sequence
  Synthetic
MVFTLEDFVGDWRQTAAYNLDQVLEQGGVSSLFQNLAVSVTPIQRIVLSGENALKIDIHVIIPYEGLSADQMAQIEKIFKVVYPVDDHHFKVILHYGTLVIDGVTPNMIDYFGRPYEGIAVFDGKKITVTGTLWNGNKIIDERLINPDGSYLFRVTINV

SEQ ID NO: 855 - DNA, 477 bp, Artificial Sequence
  Synthetic
atggtcttcacactcgaagatttcgttggggactggcgacagacagccgcctacaacctggaccaagtccttgaacagggaggtgtgtccagtttgtttcagaatctcgccgtgtccgtaactccgatccaaaggattgtcctgagcggtgaaaatgccctgaagatcgacatccatgtcatcatcccgtatgaaggtctgagcgccgaccaaatggcccagatcgaaaaaatttttaaggtggtgtaccctgtggatgatcatcactttaaggtgatcctgcactatggcacactggtaatcgacggggttacgccgaacatgatcgactatttcggacggccgtatgaaggcatcgccgtgttcgacggcaaaaagatcactgtaacagggaccctgtggaacggcaacaaaattatcgacgagcgcctgatcaaccccgacggctccctgctgttccgagtaaccatcaacgcc

SEQ ID NO: 856 - protein, 159 aa, Artificial Sequence
  Synthetic
MVFTLEDFVGDWRQTAAYNLDQVLEQGGVSSLFQNLAVSVTPIQRIVLSGENALKIDIHVIIPYEGLSADQMAQIEKIFKVVYPVDDHHFKVILHYGTLVIDGVTPNMIDYFGRPYEGIAVFDGKKITVTGTLWNGNKIIDERLINPDGSLLFRVTINA

SEQ ID NO: 857 - DNA, 477 bp, Artificial Sequence
  Synthetic
atggtcttcacactcgaagatttcgttggggactggcgacagacagccgcctacaacctggaccaagtccttgaacagggaggtgtgtccagtttgtttcagaatctcgccgtgtccgtaactccgatccaaaggattgtcctgagcggtgaaaatgccctgaagatcgacatccatgtcatcatcccgtatgaaggtctgagcgccgaccaaatggcccagatcgaaaaaatttttaaggtggtgtaccctgtggatgatcatcactttaaggtgatcctgcactatggcacactggtaatcgacggggttacgccgaacatgatcgactatttcggacggccgtatgaaggcatcgccgtgttcgacggcaaaaagatcactgtaacagggaccctgtggaacggcaacaaaattatcgacgagcgcctgatcaaccccgacggctccctgctgttccgagtaaccatcaactgc

SEQ ID NO: 858 - protein, 159 aa, Artificial Sequence
  Synthetic
MVFTLEDFVGDWRQTAAYNLDQVLEQGGVSSLFQNLAVSVTPIQRIVLSGENALKIDIHVIIPYEGLSADQMAQIEKIFKVVYPVDDHHFKVILHYGTLVIDGVTPNMIDYFGRPYEGIAVFDGKKITVTGTLWNGNKIIDERLINPDGSLLFRVTINC

SEQ ID NO: 859 - DNA, 477 bp, Artificial Sequence
  Synthetic
atggtcttcacactcgaagatttcgttggggactggcgacagacagccgcctacaacctggaccaagtccttgaacagggaggtgtgtccagtttgtttcagaatctcgccgtgtccgtaactccgatccaaaggattgtcctgagcggtgaaaatgccctgaagatcgacatccatgtcatcatcccgtatgaaggtctgagcgccgaccaaatggcccagatcgaaaaaatttttaaggtggtgtaccctgtggatgatcatcactttaaggtgatcctgcactatggcacactggtaatcgacggggttacgccgaacatgatcgactatttcggacggccgtatgaaggcatcgccgtgttcgacggcaaaaagatcactgtaacagggaccctgtggaacggcaacaaaattatcgacgagcgcctgatcaaccccgacggctccctgctgttccgagtaaccatcaacgac

SEQ ID NO: 860 - protein, 159 aa, Artificial Sequence
  Synthetic
MVFTLEDFVGDWRQTAAYNLDQVLEQGGVSSLFQNLAVSVTPIQRIVLSGENALKIDIHVIIPYEGLSADQMAQIEKIFKVVYPVDDHHFKVILHYGTLVIDGVTPNMIDYFGRPYEGIAVFDGKKITVTGTLWNGNKIIDERLINPDGSLLFRVTIND

SEQ ID NO: 861 - DNA, 477 bp, Artificial Sequence
  Synthetic
atggtcttcacactcgaagatttcgttggggactggcgacagacagccgcctacaacctggaccaagtccttgaacagggaggtgtgtccagtttgtttcagaatctcgccgtgtccgtaactccgatccaaaggattgtcctgagcggtgaaaatgccctgaagatcgacatccatgtcatcatcccgtatgaaggtctgagcgccgaccaaatggcccagatcgaaaaaatttttaaggtggtgtaccctgtggatgatcatcactttaaggtgatcctgcactatggcacactggtaatcgacggggttacgccgaacatgatcgactatttcggacggccgtatgaaggcatcgccgtgttcgacggcaaaaagatcactgtaacagggaccctgtggaacggcaacaaaattatcgacgagcgcctgatcaaccccgacggctccctgctgttccgagtaaccatcaacgag

SEQ ID NO: 862 - protein, 159 aa, Artificial Sequence
  Synthetic
MVFTLEDFVGDWRQTAAYNLDQVLEQGGVSSLFQNLAVSVTPIQRIVLSGENALKIDIHVIIPYEGLSADQMAQIEKIFKVVYPVDDHHFKVILHYGTLVIDGVTPNMIDYFGRPYEGIAVFDGKKITVTGTLWNGNKIIDERLINPDGSLLFRVTINE

SEQ ID NO: 863 - DNA, 477 bp, Artificial Sequence
  Synthetic
atggtcttcacactcgaagatttcgttggggactggcgacagacagccgcctacaacctggaccaagtccttgaacagggaggtgtgtccagtttgtttcagaatctcgccgtgtccgtaactccgatccaaaggattgtcctgagcggtgaaaatgccctgaagatcgacatccatgtcatcatcccgtatgaaggtctgagcgccgaccaaatggcccagatcgaaaaaatttttaaggtggtgtaccctgtggatgatcatcactttaaggtgatcctgcactatggcacactggtaatcgacggggttacgccgaacatgatcgactatttcggacggccgtatgaaggcatcgccgtgttcgacggcaaaaagatcactgtaacagggaccctgtggaacggcaacaaaattatcgacgagcgcctgatcaaccccgacggctccctgctgttccgagtaaccatcaacttc

SEQ ID NO: 864 - protein, 159 aa, Artificial Sequence
  Synthetic
MVFTLEDFVGDWRQTAAYNLDQVLEQGGVSSLFQNLAVSVTPIQRIVLSGENALKIDIHVIIPYEGLSADQMAQIEKIFKVVYPVDDHHFKVILHYGTLVIDGVTPNMIDYFGRPYEGIAVFDGKKITVTGTLWNGNKIIDERLINPDGSLLFRVTINF

SEQ ID NO: 865 - DNA, 477 bp, Artificial Sequence
  Synthetic
atggtcttcacactcgaagatttcgttggggactggcgacagacagccgcctacaacctggaccaagtccttgaacagggaggtgtgtccagtttgtttcagaatctcgccgtgtccgtaactccgatccaaaggattgtcctgagcggtgaaaatgccctgaagatcgacatccatgtcatcatcccgtatgaaggtctgagcgccgaccaaatggcccagatcgaaaaaatttttaaggtggtgtaccctgtggatgatcatcactttaaggtgatcctgcactatggcacactggtaatcgacggggttacgccgaacatgatcgactatttcggacggccgtatgaaggcatcgccgtgttcgacggcaaaaagatcactgtaacagggaccctgtggaacggcaacaaaattatcgacgagcgcctgatcaaccccgacggctccctgctgttccgagtaaccatcaacggc

SEQ ID NO: 866 - protein, 159 aa, Artificial Sequence
  Synthetic
MVFTLEDFVGDWRQTAAYNLDQVLEQGGVSSLFQNLAVSVTPIQRIVLSGENALKIDIHVIIPYEGLSADQMAQIEKIFKVVYPVDDHHFKVILHYGTLVIDGVTPNMIDYFGRPYEGIAVFDGKKITVTGTLWNGNKIIDERLINPDGSLLFRVTING

SEQ ID NO: 867 - DNA, 477 bp, Artificial Sequence
  Synthetic
atggtcttcacactcgaagatttcgttggggactggcgacagacagccgcctacaacctggaccaagtccttgaacagggaggtgtgtccagtttgtttcagaatctcgccgtgtccgtaactccgatccaaaggattgtcctgagcggtgaaaatgccctgaagatcgacatccatgtcatcatcccgtatgaaggtctgagcgccgaccaaatggcccagatcgaaaaaatttttaaggtggtgtaccctgtggatgatcatcactttaaggtgatcctgcactatggcacactggtaatcgacggggttacgccgaacatgatcgactatttcggacggccgtatgaaggcatcgccgtgttcgacggcaaaaagatcactgtaacagggaccctgtggaacggcaacaaaattatcgacgagcgcctgatcaaccccgacggctccctgctgttccgagtaaccatcaaccac

SEQ ID NO: 868 - protein, 159 aa, Artificial Sequence
  Synthetic
MVFTLEDFVGDWRQTAAYNLDQVLEQGGVSSLFQNLAVSVTPIQRIVLSGENALKIDIHVIIPYEGLSADQMAQIEKIFKVVYPVDDHHFKVILHYGTLVIDGVTPNMIDYFGRPYEGIAVFDGKKITVTGTLWNGNKIIDERLINPDGSLLFRVTINH

SEQ ID NO: 869 - DNA, 477 bp, Artificial Sequence
  Synthetic
atggtcttcacactcgaagatttcgttggggactggcgacagacagccgcctacaacctggaccaagtccttgaacagggaggtgtgtccagtttgtttcagaatctcgccgtgtccgtaactccgatccaaaggattgtcctgagcggtgaaaatgccctgaagatcgacatccatgtcatcatcccgtatgaaggtctgagcgccgaccaaatggcccagatcgaaaaaatttttaaggtggtgtaccctgtggatgatcatcactttaaggtgatcctgcactatggcacactggtaatcgacggggttacgccgaacatgatcgactatttcggacggccgtatgaaggcatcgccgtgttcgacggcaaaaagatcactgtaacagggaccctgtggaacggcaacaaaattatcgacgagcgcctgatcaaccccgacggctccctgctgttccgagtaaccatcaacatc

SEQ ID NO: 870 - protein, 159 aa, Artificial Sequence
  Synthetic
MVFTLEDFVGDWRQTAAYNLDQVLEQGGVSSLFQNLAVSVTPIQRIVLSGENALKIDIHVIIPYEGLSADQMAQIEKIFKVVYPVDDHHFKVILHYGTLVIDGVTPNMIDYFGRPYEGIAVFDGKKITVTGTLWNGNKIIDERLINPDGSLLFRVTINI

SEQ ID NO: 871 - DNA, 477 bp, Artificial Sequence
  Synthetic
atggtcttcacactcgaagatttcgttggggactggcgacagacagccgcctacaacctggaccaagtccttgaacagggaggtgtgtccagtttgtttcagaatctcgccgtgtccgtaactccgatccaaaggattgtcctgagcggtgaaaatgccctgaagatcgacatccatgtcatcatcccgtatgaaggtctgagcgccgaccaaatggcccagatcgaaaaaatttttaaggtggtgtaccctgtggatgatcatcactttaaggtgatcctgcactatggcacactggtaatcgacggggttacgccgaacatgatcgactatttcggacggccgtatgaaggcatcgccgtgttcgacggcaaaaagatcactgtaacagggaccctgtggaacggcaacaaaattatcgacgagcgcctgatcaaccccgacggctccctgctgttccgagtaaccatcaacaag

SEQ ID NO: 872 - protein, 159 aa, Artificial Sequence
  Synthetic
MVFTLEDFVGDWRQTAAYNLDQVLEQGGVSSLFQNLAVSVTPIQRIVLSGENALKIDIHVIIPYEGLSADQMAQIEKIFKVVYPVDDHHFKVILHYGTLVIDGVTPNMIDYFGRPYEGIAVFDGKKITVTGTLWNGNKIIDERLINPDGSLLFRVTINK

SEQ ID NO: 873 - DNA, 477 bp, Artificial Sequence
  Synthetic
atggtcttcacactcgaagatttcgttggggactggcgacagacagccgcctacaacctggaccaagtccttgaacagggaggtgtgtccagtttgtttcagaatctcgccgtgtccgtaactccgatccaaaggattgtcctgagcggtgaaaatgccctgaagatcgacatccatgtcatcatcccgtatgaaggtctgagcgccgaccaaatggcccagatcgaaaaaatttttaaggtggtgtaccctgtggatgatcatcactttaaggtgatcctgcactatggcacactggtaatcgacggggttacgccgaacatgatcgactatttcggacggccgtatgaaggcatcgccgtgttcgacggcaaaaagatcactgtaacagggaccctgtggaacggcaacaaaattatcgacgagcgcctgatcaaccccgacggctccctgctgttccgagtaaccatcaacctg

SEQ ID NO: 874 - protein, 159 aa, Artificial Sequence
  Synthetic
MVFTLEDFVGDWRQTAAYNLDQVLEQGGVSSLFQNLAVSVTPIQRIVLSGENALKIDIHVIIPYEGLSADQMAQIEKIFKVVYPVDDHHFKVILHYGTLVIDGVTPNMIDYFGRPYEGIAVFDGKKITVTGTLWNGNKIIDERLINPDGSLLFRVTINL

SEQ ID NO: 875 - DNA, 477 bp, Artificial Sequence
  Synthetic
atggtcttcacactcgaagatttcgttggggactggcgacagacagccgcctacaacctggaccaagtccttgaacagggaggtgtgtccagtttgtttcagaatctcgccgtgtccgtaactccgatccaaaggattgtcctgagcggtgaaaatgccctgaagatcgacatccatgtcatcatcccgtatgaaggtctgagcgccgaccaaatggcccagatcgaaaaaatttttaaggtggtgtaccctgtggatgatcatcactttaaggtgatcctgcactatggcacactggtaatcgacggggttacgccgaacatgatcgactatttcggacggccgtatgaaggcatcgccgtgttcgacggcaaaaagatcactgtaacagggaccctgtggaacggcaacaaaattatcgacgagcgcctgatcaaccccgacggctccctgctgttccgagtaaccatcaacatg

SEQ ID NO: 876 - protein, 159 aa, Artificial Sequence
  Synthetic
MVFTLEDFVGDWRQTAAYNLDQVLEQGGVSSLFQNLAVSVTPIQRIVLSGENALKIDIHVIIPYEGLSADQMAQIEKIFKVVYPVDDHHFKVILHYGTLVIDGVTPNMIDYFGRPYEGIAVFDGKKITVTGTLWNGNKIIDERLINPDGSLLFRVTINM

SEQ ID NO: 877 - DNA, 477 bp, Artificial Sequence
  Synthetic
atggtcttcacactcgaagatttcgttggggactggcgacagacagccgcctacaacctggaccaagtccttgaacagggaggtgtgtccagtttgtttcagaatctcgccgtgtccgtaactccgatccaaaggattgtcctgagcggtgaaaatgccctgaagatcgacatccatgtcatcatcccgtatgaaggtctgagcgccgaccaaatggcccagatcgaaaaaatttttaaggtggtgtaccctgtggatgatcatcactttaaggtgatcctgcactatggcacactggtaatcgacggggttacgccgaacatgatcgactatttcggacggccgtatgaaggcatcgccgtgttcgacggcaaaaagatcactgtaacagggaccctgtggaacggcaacaaaattatcgacgagcgcctgatcaaccccgacggctccctgctgttccgagtaaccatcaacaac

SEQ ID NO: 878 - protein, 159 aa, Artificial Sequence
  Synthetic
MVFTLEDFVGDWRQTAAYNLDQVLEQGGVSSLFQNLAVSVTPIQRIVLSGENALKIDIHVIIPYEGLSADQMAQIEKIFKVVYPVDDHHFKVILHYGTLVIDGVTPNMIDYFGRPYEGIAVFDGKKITVTGTLWNGNKIIDERLINPDGSLLFRVTINN

SEQ ID NO: 879 - DNA, 477 bp, Artificial Sequence
  Synthetic
atggtcttcacactcgaagatttcgttggggactggcgacagacagccgcctacaacctggaccaagtccttgaacagggaggtgtgtccagtttgtttcagaatctcgccgtgtccgtaactccgatccaaaggattgtcctgagcggtgaaaatgccctgaagatcgacatccatgtcatcatcccgtatgaaggtctgagcgccgaccaaatggcccagatcgaaaaaatttttaaggtggtgtaccctgtggatgatcatcactttaaggtgatcctgcactatggcacactggtaatcgacggggttacgccgaacatgatcgactatttcggacggccgtatgaaggcatcgccgtgttcgacggcaaaaagatcactgtaacagggaccctgtggaacggcaacaaaattatcgacgagcgcctgatcaaccccgacggctccctgctgttccgagtaaccatcaacccc

SEQ ID NO: 880 - protein, 159 aa, Artificial Sequence
  Synthetic
MVFTLEDFVGDWRQTAAYNLDQVLEQGGVSSLFQNLAVSVTPIQRIVLSGENALKIDIHVIIPYEGLSADQMAQIEKIFKVVYPVDDHHFKVILHYGTLVIDGVTPNMIDYFGRPYEGIAVFDGKKITVTGTLWNGNKIIDERLINPDGSLLFRVTINP

SEQ ID NO: 881 - DNA, 477 bp, Artificial Sequence
  Synthetic
atggtcttcacactcgaagatttcgttggggactggcgacagacagccgcctacaacctggaccaagtccttgaacagggaggtgtgtccagtttgtttcagaatctcgccgtgtccgtaactccgatccaaaggattgtcctgagcggtgaaaatgccctgaagatcgacatccatgtcatcatcccgtatgaaggtctgagcgccgaccaaatggcccagatcgaaaaaatttttaaggtggtgtaccctgtggatgatcatcactttaaggtgatcctgcactatggcacactggtaatcgacggggttacgccgaacatgatcgactatttcggacggccgtatgaaggcatcgccgtgttcgacggcaaaaagatcactgtaacagggaccctgtggaacggcaacaaaattatcgacgagcgcctgatcaaccccgacggctccctgctgttccgagtaaccatcaaccag

SEQ ID NO: 882 - protein, 159 aa, Artificial Sequence
  Synthetic
MVFTLEDFVGDWRQTAAYNLDQVLEQGGVSSLFQNLAVSVTPIQRIVLSGENALKIDIHVIIPYEGLSADQMAQIEKIFKVVYPVDDHHFKVILHYGTLVIDGVTPNMIDYFGRPYEGIAVFDGKKITVTGTLWNGNKIIDERLINPDGSLLFRVTINQ

SEQ ID NO: 883 - DNA, 477 bp, Artificial Sequence
  Synthetic
atggtcttcacactcgaagatttcgttggggactggcgacagacagccgcctacaacctggaccaagtccttgaacagggaggtgtgtccagtttgtttcagaatctcgccgtgtccgtaactccgatccaaaggattgtcctgagcggtgaaaatgccctgaagatcgacatccatgtcatcatcccgtatgaaggtctgagcgccgaccaaatggcccagatcgaaaaaatttttaaggtggtgtaccctgtggatgatcatcactttaaggtgatcctgcactatggcacactggtaatcgacggggttacgccgaacatgatcgactatttcggacggccgtatgaaggcatcgccgtgttcgacggcaaaaagatcactgtaacagggaccctgtggaacggcaacaaaattatcgacgagcgcctgatcaaccccgacggctccctgctgttccgagtaaccatcaaccgg

SEQ ID NO: 884 - protein, 159 aa, Artificial Sequence
  Synthetic
MVFTLEDFVGDWRQTAAYNLDQVLEQGGVSSLFQNLAVSVTPIQRIVLSGENALKIDIHVIIPYEGLSADQMAQIEKIFKVVYPVDDHHFKVILHYGTLVIDGVTPNMIDYFGRPYEGIAVFDGKKITVTGTLWNGNKIIDERLINPDGSLLFRVTINR

SEQ ID NO: 885 - DNA, 477 bp, Artificial Sequence
  Synthetic
atggtcttcacactcgaagatttcgttggggactggcgacagacagccgcctacaacctggaccaagtccttgaacagggaggtgtgtccagtttgtttcagaatctcgccgtgtccgtaactccgatccaaaggattgtcctgagcggtgaaaatgccctgaagatcgacatccatgtcatcatcccgtatgaaggtctgagcgccgaccaaatggcccagatcgaaaaaatttttaaggtggtgtaccctgtggatgatcatcactttaaggtgatcctgcactatggcacactggtaatcgacggggttacgccgaacatgatcgactatttcggacggccgtatgaaggcatcgccgtgttcgacggcaaaaagatcactgtaacagggaccctgtggaacggcaacaaaattatcgacgagcgcctgatcaaccccgacggctccctgctgttccgagtaaccatcaacagc

SEQ ID NO: 886 - protein, 159 aa, Artificial Sequence
  Synthetic
MVFTLEDFVGDWRQTAAYNLDQVLEQGGVSSLFQNLAVSVTPIQRIVLSGENALKIDIHVIIPYEGLSADQMAQIEKIFKVVYPVDDHHFKVILHYGTLVIDGVTPNMIDYFGRPYEGIAVFDGKKITVTGTLWNGNKIIDERLINPDGSLLFRVTINS

SEQ ID NO: 887 - DNA, 477 bp, Artificial Sequence
  Synthetic
atggtcttcacactcgaagatttcgttggggactggcgacagacagccgcctacaacctggaccaagtccttgaacagggaggtgtgtccagtttgtttcagaatctcgccgtgtccgtaactccgatccaaaggattgtcctgagcggtgaaaatgccctgaagatcgacatccatgtcatcatcccgtatgaaggtctgagcgccgaccaaatggcccagatcgaaaaaatttttaaggtggtgtaccctgtggatgatcatcactttaaggtgatcctgcactatggcacactggtaatcgacggggttacgccgaacatgatcgactatttcggacggccgtatgaaggcatcgccgtgttcgacggcaaaaagatcactgtaacagggaccctgtggaacggcaacaaaattatcgacgagcgcctgatcaaccccgacggctccctgctgttccgagtaaccatcaacacc

SEQ ID NO: 888 - protein, 159 aa, Artificial Sequence
  Synthetic
MVFTLEDFVGDWRQTAAYNLDQVLEQGGVSSLFQNLAVSVTPIQRIVLSGENALKIDIHVIIPYEGLSADQMAQIEKIFKVVYPVDDHHFKVILHYGTLVIDGVTPNMIDYFGRPYEGIAVFDGKKITVTGTLWNGNKIIDERLINPDGSLLFRVTINT

SEQ ID NO: 889 - DNA, 477 bp, Artificial Sequence
  Synthetic
atggtcttcacactcgaagatttcgttggggactggcgacagacagccgcctacaacctggaccaagtccttgaacagggaggtgtgtccagtttgtttcagaatctcgccgtgtccgtaactccgatccaaaggattgtcctgagcggtgaaaatgccctgaagatcgacatccatgtcatcatcccgtatgaaggtctgagcgccgaccaaatggcccagatcgaaaaaatttttaaggtggtgtaccctgtggatgatcatcactttaaggtgatcctgcactatggcacactggtaatcgacggggttacgccgaacatgatcgactatttcggacggccgtatgaaggcatcgccgtgttcgacggcaaaaagatcactgtaacagggaccctgtggaacggcaacaaaattatcgacgagcgcctgatcaaccccgacggctccctgctgttccgagtaaccatcaactgg

SEQ ID NO: 890 - protein, 159 aa, Artificial Sequence
  Synthetic
MVFTLEDFVGDWRQTAAYNLDQVLEQGGVSSLFQNLAVSVTPIQRIVLSGENALKIDIHVIIPYEGLSADQMAQIEKIFKVVYPVDDHHFKVILHYGTLVIDGVTPNMIDYFGRPYEGIAVFDGKKITVTGTLWNGNKIIDERLINPDGSLLFRVTINW

SEQ ID NO: 891 - DNA, 477 bp, Artificial Sequence
  Synthetic
atggtcttcacactcgaagatttcgttggggactggcgacagacagccgcctacaacctggaccaagtccttgaacagggaggtgtgtccagtttgtttcagaatctcgccgtgtccgtaactccgatccaaaggattgtcctgagcggtgaaaatgccctgaagatcgacatccatgtcatcatcccgtatgaaggtctgagcgccgaccaaatggcccagatcgaaaaaatttttaaggtggtgtaccctgtggatgatcatcactttaaggtgatcctgcactatggcacactggtaatcgacggggttacgccgaacatgatcgactatttcggacggccgtatgaaggcatcgccgtgttcgacggcaaaaagatcactgtaacagggaccctgtggaacggcaacaaaattatcgacgagcgcctgatcaaccccgacggctccctgctgttccgagtaaccatcaactac

SEQ ID NO: 892 - protein, 159 aa, Artificial Sequence
  Synthetic
MVFTLEDFVGDWRQTAAYNLDQVLEQGGVSSLFQNLAVSVTPIQRIVLSGENALKIDIHVIIPYEGLSADQMAQIEKIFKVVYPVDDHHFKVILHYGTLVIDGVTPNMIDYFGRPYEGIAVFDGKKITVTGTLWNGNKIIDERLINPDGSLLFRVTINY

SEQ ID NO: 893 - DNA, 477 bp, Artificial Sequence
  Synthetic
atggtcttcacactcgaagatttcgttggggactggcgacagacagccgcctacaacctggacaaggtccttgaacagggaggtgtgtccagtttgtttcagaatctcgccgtgtccgtaactccgatccaaaggattgtcctgagcggtgaaaatgccctgaagatcgacatccatgtcatcatcccgtatgaaggtctgagcgccgaccaaatggcccagatcgaaaaaatttttaaggtggtgtaccctgtggatgatcatcactttaaggtgatcctgcactatggcacactggtaatcgacggggttacgccgaacatgatcgactatttcggacggccgtatgaaggcatcgccgtgttcgacggcaaaaagatcactgtaacagggaccctgtggaacggcaacaaaattatcgacgagcgcctgatcaaccccgacggctccctgctgttccgagtaaccatcaacgtt

SEQ ID NO: 894 - protein, 159 aa, Artificial Sequence
  Synthetic
MVFTLEDFVGDWRQTAAYNLDKVLEQGGVSSLFQNLAVSVTPIQRIVLSGENALKIDIHVIIPYEGLSADQMAQIEKIFKVVYPVDDHHFKVILHYGTLVIDGVTPNMIDYFGRPYEGIAVFDGKKITVTGTLWNGNKIIDERLINPDGSLLFRVTINV

SEQ ID NO: 895 - DNA, 477 bp, Artificial Sequence
  Synthetic
atggtcttcacactcgaagatttcgttggggactggcgacagacagccgcctacaacctggaccaagtccttgaacagggaggtatgtccagtttgtttcagaatctcgccgtgtccgtaactccgatccaaaggattgtcctgagcggtgaaaatgccctgaagatcgacatccatgtcatcatcccgtatgaaggtctgagcgccgaccaaatggcccagatcgaaaaaatttttaaggtggtgtaccctgtggatgatcatcactttaaggtgatcctgcactatggcacactggtaatcgacggggttacgccgaacatgatcgactatttcggacggccgtatgaaggcatcgccgtgttcgacggcaaaaagatcactgtaacagggaccctgtggaacggcaacaaaattatcgacgagcgcctgatcaaccccgacggctccctgctgttccgagtaaccatcaacgtt

SEQ ID NO: 896 - protein, 159 aa, Artificial Sequence
  Synthetic
MVFTLEDFVGDWRQTAAYNLDQVLEQGGMSSLFQNLAVSVTPIQRIVLSGENALKIDIHVIIPYEGLSADQMAQIEKIFKVVYPVDDHHFKVILHYGTLVIDGVTPNMIDYFGRPYEGIAVFDGKKITVTGTLWNGNKIIDERLINPDGSLLFRVTINV

SEQ ID NO: 897 - DNA, 477 bp, Artificial Sequence
  Synthetic
atggtcttcacactcgaagatttcgttggggactggcgacagacagccgcctacaacctggaccaagtccttgaacagggaggtgtgtccagtttgtttcagaagctcgccgtgtccgtaactccgatccaaaggattgtcctgagcggtgaaaatgccctgaagatcgacatccatgtcatcatcccgtatgaaggtctgagcgccgaccaaatggcccagatcgaaaaaatttttaaggtggtgtaccctgtggatgatcatcactttaaggtgatcctgcactatggcacactggtaatcgacggggttacgccgaacatgatcgactatttcggacggccgtatgaaggcatcgccgtgttcgacggcaaaaagatcactgtaacagggaccctgtggaacggcaacaaaattatcgacgagcgcctgatcaaccccgacggctccctgctgttccgagtaaccatcaacgtt

SEQ ID NO: 898 - protein, 159 aa, Artificial Sequence
  Synthetic
MVFTLEDFVGDWRQTAAYNLDQVLEQGGVSSLFQKLAVSVTPIQRIVLSGENALKIDIHVIIPYEGLSADQMAQIEKIFKVVYPVDDHHFKVILHYGTLVIDGVTPNMIDYFGRPYEGIAVFDGKKITVTGTLWNGNKIIDERLINPDGSLLFRVTINV

SEQ ID NO: 899 - DNA, 477 bp, Artificial Sequence
  Synthetic
atggtcttcacactcgaagatttcgttggggactggcgacagacagccgcctacaacctggaccaagtccttgaacagggaggtgtgtccagtttgtttcagaatctcgccgtgtccatcactccgatccaaaggattgtcctgagcggtgaaaatgccctgaagatcgacatccatgtcatcatcccgtatgaaggtctgagcgccgaccaaatggcccagatcgaaaaaatttttaaggtggtgtaccctgtggatgatcatcactttaaggtgatcctgcactatggcacactggtaatcgacggggttacgccgaacatgatcgactatttcggacggccgtatgaaggcatcgccgtgttcgacggcaaaaagatcactgtaacagggaccctgtggaacggcaacaaaattatcgacgagcgcctgatcaaccccgacggctccctgctgttccgagtaaccatcaacgtt

SEQ ID NO: 900 - protein, 159 aa, Artificial Sequence
  Synthetic
MVFTLEDFVGDWRQTAAYNLDQVLEQGGVSSLFQNLAVSITPIQRIVLSGENALKIDIHVIIPYEGLSADQMAQIEKIFKVVYPVDDHHFKVILHYGTLVIDGVTPNMIDYFGRPYEGIAVFDGKKITVTGTLWNGNKIIDERLINPDGSLLFRVTINV

SEQ ID NO: 901 - DNA, 477 bp, Artificial Sequence
  Synthetic
atggtcttcacactcgaagatttcgttggggactggcgacagacagccgcctacaacctggaccaagtccttgaacagggaggtgtgtccagtttgtttcagaatctcgccgtgtccgtaactccgatccaaaggattgtcctgagcggtgaaaatgccctgaagatcgacaaccatgtcatcatcccgtatgaaggtctgagcgccgaccaaatggcccagatcgaaaaaatttttaaggtggtgtaccctgtggatgatcatcactttaaggtgatcctgcactatggcacactggtaatcgacggggttacgccgaacatgatcgactatttcggacggccgtatgaaggcatcgccgtgttcgacggcaaaaagatcactgtaacagggaccctgtggaacggcaacaaaattatcgacgagcgcctgatcaaccccgacggctccctgctgttccgagtaaccatcaacgtt

SEQ ID NO: 902 - protein, 159 aa, Artificial Sequence
  Synthetic
MVFTLEDFVGDWRQTAAYNLDQVLEQGGVSSLFQNLAVSVTPIQRIVLSGENALKIDNHVIIPYEGLSADQMAQIEKIFKVVYPVDDHHFKVILHYGTLVIDGVTPNMIDYFGRPYEGIAVFDGKKITVTGTLWNGNKIIDERLINPDGSLLFRVTINV

SEQ ID NO: 903 - DNA, 477 bp, Artificial Sequence
  Synthetic
atggtcttcacactcgaagatttcgttggggactggcgacagacagccgcctacaacctggaccaagtccttgaacagggaggtgtgtccagtttgtttcagaatctcgccgtgtccgtaactccgatccaaaggattgtcctgagcggtgaaaatgccctgaagatcgacatccatgtcatcatcccgtatgaaggtctgagcgccgaccaaatggcccagatcgaaaaaatttttaaggtggtgtaccctgtggatgatcatcactttaaggtgatcctgcactatggcacactggtaatcgacggggttacgccgaacatgatcaactatttcggacggccgtatgaaggcatcgccgtgttcgacggcaaaaagatcactgtaacagggaccctgtggaacggcaacaaaattatcgacgagcgcctgatcaaccccgacggctccctgctgttccgagtaaccatcaacgtt

SEQ ID NO: 904 - protein, 159 aa, Artificial Sequence
  Synthetic
MVFTLEDFVGDWRQTAAYNLDQVLEQGGVSSLFQNLAVSVTPIQRIVLSGENALKIDIHVIIPYEGLSADQMAQIEKIFKVVYPVDDHHFKVILHYGTLVIDGVTPNMINYFGRPYEGIAVFDGKKITVTGTLWNGNKIIDERLINPDGSLLFRVTINV

SEQ ID NO: 905 - DNA, 477 bp, Artificial Sequence
  Synthetic
atggtcttcacactcgaagatttcgttggggactggcgacagacagccgcctacaacctggaccaagtccttgaacagggaggtgtgtccagtttgtttcagaatctcgccgtgtccgtaactccgatccaaaggattgtcctgagcggtgaaaatgccctgaagatcgacatccatgtcatcatcccgtatgaaggtctgagcgccgaccaaatggcccagatcgaaaaaatttttaaggtggtgtaccctgtggatgatcatcactttaaggtgatcctgcactatggcacactggtaatcgacggggttacgccgaacatgatcgactatttcggacggccgtatgaaggcatcgccgtgttcgacggcaaaaagatcactgtaacagggaccctgtggaacggcaacaaaattatcgacgagcgcctgatcacccccgacggctccctgctgttccgagtaaccatcaacgtt

SEQ ID NO: 906 - protein, 159 aa, Artificial Sequence
  Synthetic
MVFTLEDFVGDWRQTAAYNLDQVLEQGGVSSLFQNLAVSVTPIQRIVLSGENALKIDIHVIIPYEGLSADQMAQIEKIFKVVYPVDDHHFKVILHYGTLVIDGVTPNMIDYFGRPYEGIAVFDGKKITVTGTLWNGNKIIDERLITPDGSLLFRVTINV

SEQ ID NO: 907 - DNA, 477 bp, Artificial Sequence
  Synthetic
atggtcttcacactcgaagatttcgttggggactggcgacagacagccgcctacaacctggaccaagtccttgaacagggaggtatgtccagtttgtttcagaatctcggggtgtccgtaactccgatccaaaggattgtcctgagcggtgaaaatgccctgaagatcgacatccatgtcatcatcccgtatgaaggtctgagcgccgaccaaatggcccagatcgaaaaaatttttaaggtggtgtaccctgtggatgatcatcactttaaggtgatcctgcactatggcacactggtaatcgacggggttacgccgaacatgatcgactatttcggacggccgtatgaaggcatcgccgtgttcgacggcaaaaagatcactgtaacagggaccctgtggaacggcaacaaaattatcgacgagcgcctgatcaaccccgacggctccctgctgttccgagtaaccatcaacgtt

SEQ ID NO: 908 - protein, 159 aa, Artificial Sequence
  Synthetic
MVFTLEDFVGDWRQTAAYNLDQVLEQGGMSSLFQNLGVSVTPIQRIVLSGENALKIDIHVIIPYEGLSADQMAQIEKIFKVVYPVDDHHFKVILHYGTLVIDGVTPNMIDYFGRPYEGIAVFDGKKITVTGTLWNGNKIIDERLINPDGSLLFRVTINV

SEQ ID NO: 909 - DNA, 477 bp, Artificial Sequence
  Synthetic
atggtcttcacactcgaagatttcgttggggactggcgacagacagccgcctacaacctggaccaagtccttgaacagggaggtgtgtccagtttgtttcagaatctcgccgtgtccgtaactccgatccaaaggattgtcctgagcggtgaaaatgccctgaagatcgacatccatgtcatcatcccgtatgaaggtctgagcgccgaccaaatgggccagatcgaagagatttttaaggtggtgtaccctgtggatgatcatcactttaaggtgatcctgcactatggcacactggtaatcgacggggttacgccgaacatgatcgactatttcggacggccgtatgaaggcatcgccgtgttcgacggcaaaaagatcactgtaacagggaccctgtggaacggcaacaaaattatcgacgagcgcctgatcaaccccgacggctccctgctgttccgagtaaccatcaacgtt

SEQ ID NO: 910 - protein, 159 aa, Artificial Sequence
  Synthetic
MVFTLEDFVGDWRQTAAYNLDQVLEQGGVSSLFQNLAVSVTPIQRIVLSGENALKIDIHVIIPYEGLSADQMGQIEEIFKVVYPVDDHHFKVILHYGTLVIDGVTPNMIDYFGRPYEGIAVFDGKKITVTGTLWNGNKIIDERLINPDGSLLFRVTINV

SEQ ID NO: 911 - DNA, 477 bp, Artificial Sequence
  Synthetic
atggtcttcacactcgaagatttcgttggggactgggaacagacagccgcctacaacctggaccaagtccttgaacagggaggtgtgtccagtttgtttcagaatctcgccgtgtccgtaactccgatccaaaggattgtcctgagcggtgaaaatgccctgaagatcgacatccatgtcatcatcccgtatgaaggtctgagcgccgaccaaatggcccagatcgaaaaaatttttaaggtggtgtaccctgtggatgatcatcactttaaggtgatcctgcactatggcacactggtaatcgacggggttacgccgaacatgatcgactatttcggacggccgtatgaaggcatcgccgtgttcgacggcaaaaagatcactgtaacagggaccctgtggaacggcaacaaaattatcgacgagcgcctgatcaaccccgacggctccatgctgttccgagtaaccatcaacgtt

SEQ ID NO: 912 - protein, 159 aa, Artificial Sequence
  Synthetic
MVFTLEDFVGDWEQTAAYNLDQVLEQGGVSSLFQNLAVSVTPIQRIVLSGENALKIDIHVIIPYEGLSADQMAQIEKIFKVVYPVDDHHFKVILHYGTLVIDGVTPNMIDYFGRPYEGIAVFDGKKITVTGTLWNGNKIIDERLINPDGSMLFRVTINV

SEQ ID NO: 913 - DNA, 477 bp, Artificial Sequence
  Synthetic
atggtcttcacactcgaagatttcgttggggactgggaacagacagccgcctacaacctggaccaagtccttgaacagggaggtgtgtccagtttgtttcagaatctcgccgtgtccgtaactccgatccaaaggattgtcctgagcggtgaaaatgccctgaagatcgacatccatgtcatcatcccgtatgaaggtctgagcgccgaccaaatggcccagatcgaaaaaatttttaaggtggtgtaccctgtggatgatcatcactttaaggtgatcctgcactatggcacactggtaatcgacggggttacgccgaacatgatcgactatttcggacggccgtatgaaggcatcgccgtgttcgacggcaaaaagatcactgtaacagggaccctgtggaacggcaacaaaattatcgacgagcgcctgatcaaccccgacggctccctgctgttccgagtaaccatcaacccc

SEQ ID NO: 914 - protein, 159 aa, Artificial Sequence
  Synthetic
MVFTLEDFVGDWEQTAAYNLDQVLEQGGVSSLFQNLAVSVTPIQRIVLSGENALKIDIHVIIPYEGLSADQMAQIEKIFKVVYPVDDHHFKVILHYGTLVIDGVTPNMIDYFGRPYEGIAVFDGKKITVTGTLWNGNKIIDERLINPDGSLLFRVTINP

SEQ ID NO: 915 - DNA, 477 bp, Artificial Sequence
  Synthetic
atggtcttcacactcgaagatttcgttggggactggcgacagacagccgcctacaacctggaccaagtccttgaacagggaggtgtgtccagtttgtttcagaatctcgccgtgtccgtaactccgatccaaaggattgtcctgagcggtgaaaatgccctgaagatcgacatccatgtcatcatcccgtatgaaggtctgagcgccgaccaaatggcccagatcgaaaaaatttttaaggtggtgtaccctgtggatgatcatcactttaaggtgatcctgcactatggcacactggtaatcgacggggttacgccgaacatgatcaactatttcggacggccgtatgaaggcatcgccgtgttcgacggcaaaaagatcactgtaacagggaccctgtggaacggcaacaaaattatcgacgagcgcctgatcacccccgacggctccctgctgttccgagtaaccatcaacgtt

SEQ ID NO: 916 - protein, 159 aa, Artificial Sequence
  Synthetic
MVFTLEDFVGDWRQTAAYNLDQVLEQGGVSSLFQNLAVSVTPIQRIVLSGENALKIDIHVIIPYEGLSADQMAQIEKIFKVVYPVDDHHFKVILHYGTLVIDGVTPNMINYFGRPYEGIAVFDGKKITVTGTLWNGNKIIDERLITPDGSLLFRVTINV

SEQ ID NO: 917 - DNA, 477 bp, Artificial Sequence
  Synthetic
atggtcttcacactcgaagatttcgttggggactggcgacagacagccgcctacaacctggaccaagtccttgaacagggaggtgtgtccagtttgtttcagaatctcgccgtgtccgtaactccgatccaaaggattgtcctgagcggtgaaaatgccctgaagatcgacatccatgtcatcatcccgtatgaaggtctgagcgccgaccaaatggcccagatcgaaaaaatttttaaggtggtgtaccctgtggatgatcatcactttaaggtgatcctgcactatggcacactggtaatcgacggggttacgccgaacatgatcgactatttcggacggccgtatgaaggcatcgccgtgttcgacggcaaaaagatcactgtaacagggaccctgtggaacggcaacaaaattatcgacgagcgcctgatcaaccccgacggctccatgctgttccgagtaaccatcaacgac

SEQ ID NO: 918 - protein, 159 aa, Artificial Sequence
  Synthetic
MVFTLEDFVGDWRQTAAYNLDQVLEQGGVSSLFQNLAVSVTPIQRIVLSGENALKIDIHVIIPYEGLSADQMAQIEKIFKVVYPVDDHHFKVILHYGTLVIDGVTPNMIDYFGRPYEGIAVFDGKKITVTGTLWNGNKIIDERLINPDGSMLFRVTIND

SEQ ID NO: 919 - DNA, 477 bp, Artificial Sequence
  Synthetic
atggtcttcacactcgaagatttcgttggggactggcgacagacagccgcctacaacctggaccaagtccttgaacagggaggtgtgtccagtttgtttcagaatctcgccgtgtccgtaactccgatccaaaggattgtcctgagcggtgaaaatgccctgaagatcgacatccatgtcatcatcccgtatgaaggtctgagcgccgaccaaatggcccagatcgaaaaaatttttaaggtggtgtaccctgtggatgatcatcactttaaggtgatcctgcactatggcacactggtaatcgacggggttacgccgaacatgatcgactatttcggacggccgtatgaaggcatcgccgtgttcgacggcaaaaagatcactgtaacagggaccctgtggaacggcaacaaaattatcgacgagcgcctgatcaaccccgacggctccatgctgttccgagtaaccatcaacccc

SEQ ID NO: 920 - protein, 159 aa, Artificial Sequence
  Synthetic
MVFTLEDFVGDWRQTAAYNLDQVLEQGGVSSLFQNLAVSVTPIQRIVLSGENALKIDIHVIIPYEGLSADQMAQIEKIFKVVYPVDDHHFKVILHYGTLVIDGVTPNMIDYFGRPYEGIAVFDGKKITVTGTLWNGNKIIDERLINPDGSMLFRVTINP

SEQ ID NO: 921 - DNA, 477 bp, Artificial Sequence
  Synthetic
atggtcttcacactcgaagatttcgttggggactgggaacagacagccgcctacaacctggaccaagtccttgaacagggaggtgtgtccagtttgtttcagaatctcgccgtgtccgtaactccgatccaaaggattgtcctgagcggtgaaaatgccctgaagatcgacatccatgtcatcatcccgtatgaaggtctgagcgccgaccaaatggcccagatcgaaaaaatttttaaggtggtgtaccctgtggatgatcatcactttaaggtgatcctgcactatggcacactggtaatcgacggggttacgccgaacatgatcgactatttcggacggccgtatgaaggcatcgccgtgttcgacggcaaaaagatcactgtaacagggaccctgtggaacggcaacaaaattatcgacgagcgcctgatcaaccccgacggctccatgctgttccgagtaaccatcaacccc

SEQ ID NO: 922 - protein, 159 aa, Artificial Sequence
  Synthetic
MVFTLEDFVGDWEQTAAYNLDQVLEQGGVSSLFQNLAVSVTPIQRIVLSGENALKIDIHVIIPYEGLSADQMAQIEKIFKVVYPVDDHHFKVILHYGTLVIDGVTPNMIDYFGRPYEGIAVFDGKKITVTGTLWNGNKIIDERLINPDGSMLFRVTINP

SEQ ID NO: 923 - DNA, 477 bp, Artificial Sequence
  Synthetic
atggtcttcacactcgaagatttcgttggggactgggaacagacagccgcctacaacctggaccaagtccttgaacagggaggtgtgtccagtttgtttcagaatctcgccgtgtccgtaactccgatccaaaggattgtcctgagcggtgaaaatgccctgaagatcgacatccatgtcatcatcccgtatgaaggtctgagcgccgaccaaatggcccagatcgaaaaaatttttaaggtggtgtaccctgtggatgatcatcactttaaggtgatcctgcactatggcacactggtaatcgacggggttacgccgaacatgatcaactatttcggacggccgtatgaaggcatcgccgtgttcgacggcaaaaagatcactgtaacagggaccctgtggaacggcaacaaaattatcgacgagcgcctgatcaaccccgacggctccatgctgttccgagtaaccatcaacccc

SEQ ID NO: 924 - protein, 159 aa, Artificial Sequence
  Synthetic
MVFTLEDFVGDWEQTAAYNLDQVLEQGGVSSLFQNLAVSVTPIQRIVLSGENALKIDIHVIIPYEGLSADQMAQIEKIFKVVYPVDDHHFKVILHYGTLVIDGVTPNMINYFGRPYEGIAVFDGKKITVTGTLWNGNKIIDERLINPDGSMLFRVTINP

SEQ ID NO: 925 - DNA, 477 bp, Artificial Sequence
  Synthetic
atggtcttcacactcgaagatttcgttggggactgggaacagacagccgcctacaacctggaccaagtccttgaacagggaggtgtgtccagtttgtttcagaatctcgccgtgtccgtaactccgatccaaaggattgtcctgagcggtgaaaatgccctgaagatcgacatccatgtcatcatcccgtatgaaggtctgagcgccgaccaaatggcccagatcgaaaaaatttttaaggtggtgtaccctgtggatgatcatcactttaaggtgatcctgcactatggcacactggtaatcgacggggttacgccgaacatgatcgactatttcggacggccgtatgaaggcatcgccgtgttcgacggcaaaaagatcactgtaacagggaccctgtggaacggcaacaaaattatcgacgagcgcctgatcacccccgacggctccatgctgttccgagtaaccatcaacccc

SEQ ID NO: 926 - protein, 159 aa, Artificial Sequence
  Synthetic
MVFTLEDFVGDWEQTAAYNLDQVLEQGGVSSLFQNLAVSVTPIQRIVLSGENALKIDIHVIIPYEGLSADQMAQIEKIFKVVYPVDDHHFKVILHYGTLVIDGVTPNMIDYFGRPYEGIAVFDGKKITVTGTLWNGNKIIDERLITPDGSMLFRVTINP

SEQ ID NO: 927 - DNA, 477 bp, Artificial Sequence
  Synthetic
atggtcttcacactcgaagatttcgttggggactgggaacagacagccgcctacaacctggaccaagtccttgaacagggaggtgtgtccagtttgtttcagaatctcgccgtgtccgtaactccgatccaaaggattgtcctgagcggtgaaaatgccctgaagatcgacatccatgtcatcatcccgtatgaaggtctgagcgccgaccaaatggcccagatcgaaaaaatttttaaggtggtgtaccctgtggatgatcatcactttaaggtgatcctgcactatggcacactggtaatcgacggggttacgccgaacatgatcgactatttcggacggccgtatgaaggcatcgccgtgttcgacggcaaaaagatcactgtaacagggaccctgtggaacggcaacaaaattatcgacgagcgcctgatcaaccccgacggctccatgctgttccgagtaaccatcaacgag

SEQ ID NO: 928 - protein, 159 aa, Artificial Sequence
  Synthetic
MVFTLEDFVGDWEQTAAYNLDQVLEQGGVSSLFQNLAVSVTPIQRIVLSGENALKIDIHVIIPYEGLSADQMAQIEKIFKVVYPVDDHHFKVILHYGTLVIDGVTPNMIDYFGRPYEGIAVFDGKKITVTGTLWNGNKIIDERLINPDGSMLFRVTINE

SEQ ID NO: 929 - DNA, 477 bp, Artificial Sequence
  Synthetic
atggtcttcacactcgaagatttcgttggggactgggaacagacagccgcctacaacctggaccaagtccttgaacagggaggtgtgtccagtttgtttcagaatctcgccgtgtccgtaactccgatccaaaggattgtcctgagcggtgaaaatgccctgaagatcgacatccatgtcatcatcccgtatgaaggtctgagcgccgaccaaatggcccagatcgaaaaaatttttaaggtggtgtaccctgtggatgatcatcactttaaggtgatcctgcactatggcacactggtaatcgacggggttacgccgaacatgatcaactatttcggacggccgtatgaaggcatcgccgtgttcgacggcaaaaagatcactgtaacagggaccctgtggaacggcaacaaaattatcgacgagcgcctgatcaaccccgacggctccatgctgttccgagtaaccatcaacgag

SEQ ID NO: 930 - protein, 159 aa, Artificial Sequence
  Synthetic
MVFTLEDFVGDWEQTAAYNLDQVLEQGGVSSLFQNLAVSVTPIQRIVLSGENALKIDIHVIIPYEGLSADQMAQIEKIFKVVYPVDDHHFKVILHYGTLVIDGVTPNMINYFGRPYEGIAVFDGKKITVTGTLWNGNKIIDERLINPDGSMLFRVTINE

SEQ ID NO: 931 - DNA, 477 bp, Artificial Sequence
  Synthetic
atggtcttcacactcgaagatttcgttggggactgggaacagacagccgcctacaacctggaccaagtccttgaacagggaggtgtgtccagtttgtttcagaatctcgccgtgtccgtaactccgatccaaaggattgtcctgagcggtgaaaatgccctgaagatcgacatccatgtcatcatcccgtatgaaggtctgagcgccgaccaaatggcccagatcgaaaaaatttttaaggtggtgtaccctgtggatgatcatcactttaaggtgatcctgcactatggcacactggtaatcgacggggttacgccgaacatgatcgactatttcggacggccgtatgaaggcatcgccgtgttcgacggcaaaaagatcactgtaacagggaccctgtggaacggcaacaaaattatcgacgagcgcctgatcacccccgacggctccatgctgttccgagtaaccatcaacgag

SEQ ID NO: 932 - protein, 159 aa, Artificial Sequence
  Synthetic
MVFTLEDFVGDWEQTAAYNLDQVLEQGGVSSLFQNLAVSVTPIQRIVLSGENALKIDIHVIIPYEGLSADQMAQIEKIFKVVYPVDDHHFKVILHYGTLVIDGVTPNMIDYFGRPYEGIAVFDGKKITVTGTLWNGNKIIDERLITPDGSMLFRVTINE

SEQ ID NO: 933 - DNA, 477 bp, Artificial Sequence
  Synthetic
atggtcttcacactcgaagatttcgttggggactgggaacagacagccgcctacaacctggaccaagtccttgaacagggaggtgtgtccagtttgtttcagaatctcgccgtgtccgtaactccgatccaaaggattgtcctgagcggtgaaaatgccctgaagatcgacatccatgtcatcatcccgtatgaaggtctgagcgccgaccaaatggcccagatcgaaaaaatttttaaggtggtgtaccctgtggatgatcatcactttaaggtgatcctgcactatggcacactggtaatcgacggggttacgccgaacatgatcaactatttcggacggccgtatgaaggcatcgccgtgttcgacggcaaaaagatcactgtaacagggaccctgtggaacggcaacaaaattatcgacgagcgcctgatcacccccgacggctccatgctgttccgagtaaccatcaacccc

SEQ ID NO: 934 - protein, 159 aa, Artificial Sequence
  Synthetic
MVFTLEDFVGDWEQTAAYNLDQVLEQGGVSSLFQNLAVSVTPIQRIVLSGENALKIDIHVIIPYEGLSADQMAQIEKIFKVVYPVDDHHFKVILHYGTLVIDGVTPNMINYFGRPYEGIAVFDGKKITVTGTLWNGNKIIDERLITPDGSMLFRVTINP

SEQ ID NO: 935 - DNA, 477 bp, Artificial Sequence
  Synthetic
atggtcttcacactcgaagatttcgttggggactgggaacagacagccgcctacaacctggaccaagtccttgaacagggaggtgtgtccagtttgtttcagaatctcgccgtgtccgtaactccgatccaaaggattgtcctgagcggtgaaaatgccctgaagatcgacaaccatgtcatcatcccgtatgaaggtctgagcgccgaccaaatggcccagatcgaaaaaatttttaaggtggtgtaccctgtggatgatcatcactttaaggtgatcctgcactatggcacactggtaatcgacggggttacgccgaacatgatcaactatttcggacggccgtatgaaggcatcgccgtgttcgacggcaaaaagatcactgtaacagggaccctgtggaacggcaacaaaattatcgacgagcgcctgatcacccccgacggctccatgctgttccgagtaaccatcaacccc

SEQ ID NO: 936 - protein, 159 aa, Artificial Sequence
  Synthetic
MVFTLEDFVGDWEQTAAYNLDQVLEQGGVSSLFQNLAVSVTPIQRIVLSGENALKIDNHVIIPYEGLSADQMAQIEKIFKVVYPVDDHHFKVILHYGTLVIDGVTPNMINYFGRPYEGIAVFDGKKITVTGTLWNGNKIIDERLITPDGSMLFRVTINP

SEQ ID NO: 937 - DNA, 477 bp, Artificial Sequence
  Synthetic
atggtcttcacactcgaagatttcgttggggactgggaacagacagccgcctacaacctggaccaagtccttgaacagggaggtgtgtccagtttgtttcagaatctcgccgtgtccgtaactccgatccaaaggattgtcctgagcggtgaaaatgccctgaagatcgacatccatgtcatcatcccgtatgaaggtctgagcgccgaccaaatggcccagatcgaaaaaatttttaaggtggtgtaccctgtggatgatcatcactttaaggtgatcctgcactatggcacactggtaatcgacggggttacgccgaacatgatcaactatttcggacggccgtatgaaggcatcgccgtgttcgacggcaaaaagatcactgtaacagggaccctgtggaacggcaacaaaattatcgacgagcgcctgatcacccccgacggctccatgctgttccgagtaaccatcaacgag

SEQ ID NO: 938 - protein, 159 aa, Artificial Sequence
  Synthetic
MVFTLEDFVGDWEQTAAYNLDQVLEQGGVSSLFQNLAVSVTPIQRIVLSGENALKIDIHVIIPYEGLSADQMAQIEKIFKVVYPVDDHHFKVILHYGTLVIDGVTPNMINYFGRPYEGIAVFDGKKITVTGTLWNGNKIIDERLITPDGSMLFRVTINE

SEQ ID NO: 939 - DNA, 477 bp, Artificial Sequence
  Synthetic
atggtcttcacactcgaagatttcgttggggactgggaacagacagccgcctacaacctggaccaagtccttgaacagggaggtgtgtccagtttgtttcagaatctcgccgtgtccgtaactccgatccaaaggattgtcctgagcggtgaaaatgccctgaagatcgacaaccatgtcatcatcccgtatgaaggtctgagcgccgaccaaatggcccagatcgaaaaaatttttaaggtggtgtaccctgtggatgatcatcactttaaggtgatcctgcactatggcacactggtaatcgacggggttacgccgaacatgatcaactatttcggacggccgtatgaaggcatcgccgtgttcgacggcaaaaagatcactgtaacagggaccctgtggaacggcaacaaaattatcgacgagcgcctgatcacccccgacggctccatgctgttccgagtaaccatcaacgag

SEQ ID NO: 940 - protein, 159 aa, Artificial Sequence
  Synthetic
MVFTLEDFVGDWEQTAAYNLDQVLEQGGVSSLFQNLAVSVTPIQRIVLSGENALKIDNHVIIPYEGLSADQMAQIEKIFKVVYPVDDHHFKVILHYGTLVIDGVTPNMINYFGRPYEGIAVFDGKKITVTGTLWNGNKIIDERLITPDGSMLFRVTINE

SEQ ID NO: 941 - DNA, 477 bp, Artificial Sequence
  Synthetic
atggtcttcacactcgaagatttcgttggggactggcaacagacagccagctacaaccaggaccaagtccttgaacagggaggtgtgtccagtttgatacagaatctcgccgtgtccgtaactccgatccaaaggattgtcctgagcggtgaaaatgccctgaagatcgacatccatgccatcatcccgtatgaaggtctgagcgacgaccaaatggcccagatcgaaaaaatttttaaggtggtgtaccctgtggatgatcatcactttaaggtgatcctgcactatggcacactggtaatcgacggggttacgccgaacgtgatcgactatttcggacggccgtatgaaggcatcgccgtgttcgacggcaaaaagatcactgtaacagggaccctgtggaacggcaacaaaattatcgacgagcgcctgatcaaccccgacggctccatgctgttccgagtaaccatcaacgac

SEQ ID NO: 942 - protein, 159 aa, Artificial Sequence
  Synthetic
MVFTLEDFVGDWNQTASYNQDQVLEQGGVSSLIQNLAVSVTPIQRIVLSGENALKIDIHAIIPYEGLSDDQMAQIEKIFKVVYPVDDHHFKVILHYGTLVIDGVTPNVIDYFGRPYEGIAVFDGKKITVTGTLWNGNKIIDERLINPDGSMLFRVTIND

SEQ ID NO: 943 - DNA, 477 bp, Artificial Sequence
  Synthetic
atggtcttcacactcgaagatttcgttggggactggcgacagacagccagctacaaccaggaccaagtccttgaacagggaggtgtgtccagtttgatacagaatctcgccgtgtccgtaactccgatccaaaggattgtcctgagcggtgaaaatgccctgaagatcgacatccatgccatcatcccgtatgaaggtctgagcgacgaccaaatggcccagatcgaaaaaatttttaaggtggtgtaccctgtggatgatcatcactttaaggtgatcctgcactatggcacactggtaatcgacggggttacgccgaacgtgatcgactatttcggacggccgtatgaaggcatcgccgtgttcgacggcaaaaagatcactgtaacagggaccctgtggaacggcaacaaaattatcgacgagcgcctgatcaaccccgacggctccatgctgttccgagtaaccatcaacgac

SEQ ID NO: 944 - protein, 159 aa, Artificial Sequence
  Synthetic
MVFTLEDFVGDWRQTASYNQDQVLEQGGVSSLIQNLAVSVTPIQRIVLSGENALKIDIHAIIPYEGLSDDQMAQIEKIFKVVYPVDDHHFKVILHYGTLVIDGVTPNVIDYFGRPYEGIAVFDGKKITVTGTLWNGNKIIDERLINPDGSMLFRVTIND

SEQ ID NO: 945 - DNA, 477 bp, Artificial Sequence
  Synthetic
atggtcttcacactcgaagatttcgttggggactggcaacagacagccgcctacaaccaggaccaagtccttgaacagggaggtgtgtccagtttgatacagaatctcgccgtgtccgtaactccgatccaaaggattgtcctgagcggtgaaaatgccctgaagatcgacatccatgccatcatcccgtatgaaggtctgagcgacgaccaaatggcccagatcgaaaaaatttttaaggtggtgtaccctgtggatgatcatcactttaaggtgatcctgcactatggcacactggtaatcgacggggttacgccgaacgtgatcgactatttcggacggccgtatgaaggcatcgccgtgttcgacggcaaaaagatcactgtaacagggaccctgtggaacggcaacaaaattatcgacgagcgcctgatcaaccccgacggctccatgctgttccgagtaaccatcaacgac

SEQ ID NO: 946 - protein, 159 aa, Artificial Sequence
  Synthetic
MVFTLEDFVGDWNQTAAYNQDQVLEQGGVSSLIQNLAVSVTPIQRIVLSGENALKIDIHAIIPYEGLSDDQMAQIEKIFKVVYPVDDHHFKVILHYGTLVIDGVTPNVIDYFGRPYEGIAVFDGKKITVTGTLWNGNKIIDERLINPDGSMLFRVTIND

SEQ ID NO: 947 - DNA, 477 bp, Artificial Sequence
  Synthetic
atggtcttcacactcgaagatttcgttggggactggcaacagacagccagctacaacctggaccaagtccttgaacagggaggtgtgtccagtttgatacagaatctcgccgtgtccgtaactccgatccaaaggattgtcctgagcggtgaaaatgccctgaagatcgacatccatgccatcatcccgtatgaaggtctgagcgacgaccaaatggcccagatcgaaaaaatttttaaggtggtgtaccctgtggatgatcatcactttaaggtgatcctgcactatggcacactggtaatcgacggggttacgccgaacgtgatcgactatttcggacggccgtatgaaggcatcgccgtgttcgacggcaaaaagatcactgtaacagggaccctgtggaacggcaacaaaattatcgacgagcgcctgatcaaccccgacggctccatgctgttccgagtaaccatcaacgac

SEQ ID NO: 948 - protein, 159 aa, Artificial Sequence
  Synthetic
MVFTLEDFVGDWNQTASYNLDQVLEQGGVSSLIQNLAVSVTPIQRIVLSGENALKIDIHAIIPYEGLSDDQMAQIEKIFKVVYPVDDHHFKVILHYGTLVIDGVTPNVIDYFGRPYEGIAVFDGKKITVTGTLWNGNKIIDERLINPDGSMLFRVTIND

SEQ ID NO: 949 - DNA, 477 bp, Artificial Sequence
  Synthetic
atggtcttcacactcgaagatttcgttggggactggcaacagacagccagctacaaccaggaccaagtccttgaacagggaggtgtgtccagtttgtttcagaatctcgccgtgtccgtaactccgatccaaaggattgtcctgagcggtgaaaatgccctgaagatcgacatccatgccatcatcccgtatgaaggtctgagcgacgaccaaatggcccagatcgaaaaaatttttaaggtggtgtaccctgtggatgatcatcactttaaggtgatcctgcactatggcacactggtaatcgacggggttacgccgaacgtgatcgactatttcggacggccgtatgaaggcatcgccgtgttcgacggcaaaaagatcactgtaacagggaccctgtggaacggcaacaaaattatcgacgagcgcctgatcaaccccgacggctccatgctgttccgagtaaccatcaacgac

SEQ ID NO: 950 - protein, 159 aa, Artificial Sequence
  Synthetic
MVFTLEDFVGDWNQTASYNQDQVLEQGGVSSLFQNLAVSVTPIQRIVLSGENALKIDIHAIIPYEGLSDDQMAQIEKIFKVVYPVDDHHFKVILHYGTLVIDGVTPNVIDYFGRPYEGIAVFDGKKITVTGTLWNGNKIIDERLINPDGSMLFRVTIND

SEQ ID NO: 951 - DNA, 477 bp, Artificial Sequence
  Synthetic
atggtcttcacactcgaagatttcgttggggactggcaacagacagccagctacaaccaggaccaagtccttgaacagggaggtgtgtccagtttgatacagaatctcgccgtgtccgtaactccgatccaaaggattgtcctgagcggtgaaaatgccctgaagatcgacatccatgtcatcatcccgtatgaaggtctgagcgacgaccaaatggcccagatcgaaaaaatttttaaggtggtgtaccctgtggatgatcatcactttaaggtgatcctgcactatggcacactggtaatcgacggggttacgccgaacgtgatcgactatttcggacggccgtatgaaggcatcgccgtgttcgacggcaaaaagatcactgtaacagggaccctgtggaacggcaacaaaattatcgacgagcgcctgatcaaccccgacggctccatgctgttccgagtaaccatcaacgac

SEQ ID NO: 952 - protein, 159 aa, Artificial Sequence
  Synthetic
MVFTLEDFVGDWNQTASYNQDQVLEQGGVSSLIQNLAVSVTPIQRIVLSGENALKIDIHVIIPYEGLSDDQMAQIEKIFKVVYPVDDHHFKVILHYGTLVIDGVTPNVIDYFGRPYEGIAVFDGKKITVTGTLWNGNKIIDERLINPDGSMLFRVTIND

SEQ ID NO: 953 - DNA, 477 bp, Artificial Sequence
  Synthetic
atggtcttcacactcgaagatttcgttggggactggcaacagacagccagctacaaccaggaccaagtccttgaacagggaggtgtgtccagtttgatacagaatctcgccgtgtccgtaactccgatccaaaggattgtcctgagcggtgaaaatgccctgaagatcgacatccatgccatcatcccgtatgaaggtctgagcgccgaccaaatggcccagatcgaaaaaatttttaaggtggtgtaccctgtggatgatcatcactttaaggtgatcctgcactatggcacactggtaatcgacggggttacgccgaacgtgatcgactatttcggacggccgtatgaaggcatcgccgtgttcgacggcaaaaagatcactgtaacagggaccctgtggaacggcaacaaaattatcgacgagcgcctgatcaaccccgacggctccatgctgttccgagtaaccatcaacgac

SEQ ID NO: 954 - protein, 159 aa, Artificial Sequence
  Synthetic
MVFTLEDFVGDWNQTASYNQDQVLEQGGVSSLIQNLAVSVTPIQRIVLSGENALKIDIHAIIPYEGLSADQMAQIEKIFKVVYPVDDHHFKVILHYGTLVIDGVTPNVIDYFGRPYEGIAVFDGKKITVTGTLWNGNKIIDERLINPDGSMLFRVTIND

SEQ ID NO: 955 - DNA, 477 bp, Artificial Sequence
  Synthetic
atggtcttcacactcgaagatttcgttggggactggcaacagacagccagctacaaccaggaccaagtccttgaacagggaggtgtgtccagtttgatacagaatctcgccgtgtccgtaactccgatccaaaggattgtcctgagcggtgaaaatgccctgaagatcgacatccatgccatcatcccgtatgaaggtctgagcgacgaccaaatggcccagatcgaaaaaatttttaaggtggtgtaccctgtggatgatcatcactttaaggtgatcctgcactatggcacactggtaatcgacggggttacgccgaacatgatcgactatttcggacggccgtatgaaggcatcgccgtgttcgacggcaaaaagatcactgtaacagggaccctgtggaacggcaacaaaattatcgacgagcgcctgatcaaccccgacggctccatgctgttccgagtaaccatcaacgac

SEQ ID NO: 956 - protein, 159 aa, Artificial Sequence
  Synthetic
MVFTLEDFVGDWNQTASYNQDQVLEQGGVSSLIQNLAVSVTPIQRIVLSGENALKIDIHAIIPYEGLSDDQMAQIEKIFKVVYPVDDHHFKVILHYGTLVIDGVTPNMIDYFGRPYEGIAVFDGKKITVTGTLWNGNKIIDERLINPDGSMLFRVTIND

SEQ ID NO: 957 - DNA, 477 bp, Artificial Sequence
  Synthetic
atggtcttcacactcgaagatttcgttggggactggcaacagacagccagctacaaccaggaccaagtccttgaacagggaggtgtgtccagtttgatacagaatctcgccgtgtccgtaactccgatccaaaggattgtcctgagcggtgaaaatgccctgaagatcgacatccatgccatcatcccgtatgaaggtctgagcgacgaccaaatggcccagatcgaaaaaatttttaaggtggtgtaccctgtggatgatcatcactttaaggtgatcctgcactatggcacactggtaatcgacggggttacgccgaacgtgatcgactatttcggacggccgtatgaaggcatcgccgtgttcgacggcaaaaagatcactgtaacagggaccctgtggaacggcaacaaaattatcgacgagcgcctgatcaaccccgacggctccctgctgttccgagtaaccatcaacgac

SEQ ID NO: 958 - protein, 159 aa, Artificial Sequence
  Synthetic
MVFTLEDFVGDWNQTASYNQDQVLEQGGVSSLIQNLAVSVTPIQRIVLSGENALKIDIHAIIPYEGLSDDQMAQIEKIFKVVYPVDDHHFKVILHYGTLVIDGVTPNVIDYFGRPYEGIAVFDGKKITVTGTLWNGNKIIDERLINPDGSLLFRVTIND

SEQ ID NO: 959 - DNA, 477 bp, Artificial Sequence
  Synthetic
atggtcttcacactcgaagatttcgttggggactggcaacagacagccagctacaaccaggaccaagtccttgaacagggaggtgtgtccagtttgatacagaatctcgccgtgtccgtaactccgatccaaaggattgtcctgagcggtgaaaatgccctgaagatcgacatccatgccatcatcccgtatgaaggtctgagcgacgaccaaatggcccagatcgaaaaaatttttaaggtggtgtaccctgtggatgatcatcactttaaggtgatcctgcactatggcacactggtaatcgacggggttacgccgaacgtgatcgactatttcggacggccgtatgaaggcatcgccgtgttcgacggcaaaaagatcactgtaacagggaccctgtggaacggcaacaaaattatcgacgagcgcctgatcaaccccgacggctccatgctgttccgagtaaccatcaacgtt

SEQ ID NO: 960 - protein, 159 aa, Artificial Sequence
  Synthetic
MVFTLEDFVGDWNQTASYNQDQVLEQGGVSSLIQNLAVSVTPIQRIVLSGENALKIDIHAIIPYEGLSDDQMAQIEKIFKVVYPVDDHHFKVILHYGTLVIDGVTPNVIDYFGRPYEGIAVFDGKKITVTGTLWNGNKIIDERLINPDGSMLFRVTINV

SEQ ID NO: 961 - DNA, 477 bp, Artificial Sequence
  Synthetic
atggtcttcacactcgaagatttcgttggggactggcgacagacagccagctacaaccaggaccaagtccttgaacagggaggtgtgtccagtttgtttcagaatctcgccgtgtccgtaactccgatccaaaggattgtcctgagcggtgaaaatgccctgaagatcgacatccatgtcatcatcccgtatgaaggtctgagcgccgaccaaatggcccagatcgaaaaaatttttaaggtggtgtaccctgtggatgatcatcactttaaggtgatcctgcactatggcacactggtaatcgacggggttacgccgaacgtgatcgactatttcggacggccgtatgaaggcatcgccgtgttcgacggcaaaaagatcactgtaacagggaccctgtggaacggcaacaaaattatcgacgagcgcctgatcaaccccgacggctccatgctgttccgagtaaccatcaacgac

SEQ ID NO: 962 - protein, 159 aa, Artificial Sequence
  Synthetic
MVFTLEDFVGDWRQTASYNQDQVLEQGGVSSLFQNLAVSVTPIQRIVLSGENALKIDIHVIIPYEGLSADQMAQIEKIFKVVYPVDDHHFKVILHYGTLVIDGVTPNVIDYFGRPYEGIAVFDGKKITVTGTLWNGNKIIDERLINPDGSMLFRVTIND

SEQ ID NO: 963 - DNA, 477 bp, Artificial Sequence
  Synthetic
atggtcttcacactcgaagatttcgttggggactggcgacagacagccagctacaaccaggaccaagtccttgaacagggaggtgtgtccagtttgtttcagaatctcgccgtgtccgtaactccgatccaaaggattgtcctgagcggtgaaaatgccctgaagatcgacatccatgtcatcatcccgtatgaaggtctgagcgacgaccaaatggcccagatcgaaaaaatttttaaggtggtgtaccctgtggatgatcatcactttaaggtgatcctgcactatggcacactggtaatcgacggggttacgccgaacgtgatcgactatttcggacggccgtatgaaggcatcgccgtgttcgacggcaaaaagatcactgtaacagggaccctgtggaacggcaacaaaattatcgacgagcgcctgatcaaccccgacggctccatgctgttccgagtaaccatcaacgac

SEQ ID NO: 964 - protein, 159 aa, Artificial Sequence
  Synthetic
MVFTLEDFVGDWRQTASYNQDQVLEQGGVSSLFQNLAVSVTPIQRIVLSGENALKIDIHVIIPYEGLSDDQMAQIEKIFKVVYPVDDHHFKVILHYGTLVIDGVTPNVIDYFGRPYEGIAVFDGKKITVTGTLWNGNKIIDERLINPDGSMLFRVTIND

SEQ ID NO: 965 - DNA, 477 bp, Artificial Sequence
  Synthetic
atggtcttcacactcgaagatttcgttggggactggcaacagacagccagctacaaccaggaccaagtccttgaacagggaggtgtgtccagtttgtttcagaatctcgccgtgtccgtaactccgatccaaaggattgtcctgagcggtgaaaatgccctgaagatcgacatccatgtcatcatcccgtatgaaggtctgagcgccgaccaaatggcccagatcgaaaaaatttttaaggtggtgtaccctgtggatgatcatcactttaaggtgatcctgcactatggcacactggtaatcgacggggttacgccgaacgtgatcgactatttcggacggccgtatgaaggcatcgccgtgttcgacggcaaaaagatcactgtaacagggaccctgtggaacggcaacaaaattatcgacgagcgcctgatcaaccccgacggctccatgctgttccgagtaaccatcaacgac

SEQ ID NO: 966 - protein, 159 aa, Artificial Sequence
  Synthetic
MVFTLEDFVGDWNQTASYNQDQVLEQGGVSSLFQNLAVSVTPIQRIVLSGENALKIDIHVIIPYEGLSADQMAQIEKIFKVVYPVDDHHFKVILHYGTLVIDGVTPNVIDYFGRPYEGIAVFDGKKITVTGTLWNGNKIIDERLINPDGSMLFRVTIND

SEQ ID NO: 967 - DNA, 480 bp, Artificial Sequence
  Synthetic
atggtcttcacactcgaagatttcgttggggactgggaacagacagccgcctacaacctggaccaagtccttgaacagggaggtgtgtccagtttgtttcagaatctcgccgtgtccgtaactccgatccaaaggattgtcctgagcggtgaaaatgccctgaagatcgacatccatgtcatcatcccgtatgaaggtctgagcgccgaccaaatggcccagatcgaaaaaatttttaaggtggtgtaccctgtggatgatcatcactttaaggtgatcctgcactatggcacactggtaatcgacggggttacgccgaacatgatcaactatttcggacggccgtatgaaggcatcgccgtgttcgacggcaaaaagatcactgtaacagggaccctgtggaacggcaacaaaattatcgacgagcgcctgatcacccccgacggctccatgctgttccgagtaaccatcaaccccgtg

SEQ ID NO: 968 - protein, 160 aa, Artificial Sequence
  Synthetic
MVFTLEDFVGDWEQTAAYNLDQVLEQGGVSSLFQNLAVSVTPIQRIVLSGENALKIDIHVIIPYEGLSADQMAQIEKIFKVVYPVDDHHFKVILHYGTLVIDGVTPNMINYFGRPYEGIAVFDGKKITVTGTLWNGNKIIDERLITPDGSMLFRVTINPV

SEQ ID NO: 969 - DNA, 480 bp, Artificial Sequence
  Synthetic
atggtcttcacactcgaagatttcgttggggactgggaacagacagccgcctacaacctggaccaagtccttgaacagggaggtgtgtccagtttgtttcagaatctcgccgtgtccgtaactccgatccaaaggattgtcctgagcggtgaaaatgccctgaagatcgacatccatgtcatcatcccgtatgaaggtctgagcgccgaccaaatggcccagatcgaaaaaatttttaaggtggtgtaccctgtggatgatcatcactttaaggtgatcctgcactatggcacactggtaatcgacggggttacgccgaacatgatcaactatttcggacggccgtatgaaggcatcgccgtgttcgacggcaaaaagatcactgtaacagggaccctgtggaacggcaacaaaattatcgacgagcgcctgatcacccccgacggctccatgctgttccgagtaaccatcaaccccgcc

SEQ ID NO: 970 - protein, 160 aa, Artificial Sequence
  Synthetic
MVFTLEDFVGDWEQTAAYNLDQVLEQGGVSSLFQNLAVSVTPIQRIVLSGENALKIDIHVIIPYEGLSADQMAQIEKIFKVVYPVDDHHFKVILHYGTLVIDGVTPNMINYFGRPYEGIAVFDGKKITVTGTLWNGNKIIDERLITPDGSMLFRVTINPA

SEQ ID NO: 971 - DNA, 483 bp, Artificial Sequence
  Synthetic
atggtcttcacactcgaagatttcgttggggactgggaacagacagccgcctacaacctggaccaagtccttgaacagggaggtgtgtccagtttgtttcagaatctcgccgtgtccgtaactccgatccaaaggattgtcctgagcggtgaaaatgccctgaagatcgacatccatgtcatcatcccgtatgaaggtctgagcgccgaccaaatggcccagatcgaaaaaatttttaaggtggtgtaccctgtggatgatcatcactttaaggtgatcctgcactatggcacactggtaatcgacggggttacgccgaacatgatcaactatttcggacggccgtatgaaggcatcgccgtgttcgacggcaaaaagatcactgtaacagggaccctgtggaacggcaacaaaattatcgacgagcgcctgatcacccccgacggctccatgctgttccgagtaaccatcaaccccgtgacc

SEQ ID NO: 972 - protein, 161 aa, Artificial Sequence
  Synthetic
MVFTLEDFVGDWEQTAAYNLDQVLEQGGVSSLFQNLAVSVTPIQRIVLSGENALKIDIHVIIPYEGLSADQMAQIEKIFKVVYPVDDHHFKVILHYGTLVIDGVTPNMINYFGRPYEGIAVFDGKKITVTGTLWNGNKIIDERLITPDGSMLFRVTINPVT

SEQ ID NO: 973 - DNA, 483 bp, Artificial Sequence
  Synthetic
atggtcttcacactcgaagatttcgttggggactgggaacagacagccgcctacaacctggaccaagtccttgaacagggaggtgtgtccagtttgtttcagaatctcgccgtgtccgtaactccgatccaaaggattgtcctgagcggtgaaaatgccctgaagatcgacatccatgtcatcatcccgtatgaaggtctgagcgccgaccaaatggcccagatcgaaaaaatttttaaggtggtgtaccctgtggatgatcatcactttaaggtgatcctgcactatggcacactggtaatcgacggggttacgccgaacatgatcaactatttcggacggccgtatgaaggcatcgccgtgttcgacggcaaaaagatcactgtaacagggaccctgtggaacggcaacaaaattatcgacgagcgcctgatcacccccgacggctccatgctgttccgagtaaccatcaaccccgtggcc

SEQ ID NO: 974 - protein, 161 aa, Artificial Sequence
  Synthetic
MVFTLEDFVGDWEQTAAYNLDQVLEQGGVSSLFQNLAVSVTPIQRIVLSGENALKIDIHVIIPYEGLSADQMAQIEKIFKVVYPVDDHHFKVILHYGTLVIDGVTPNMINYFGRPYEGIAVFDGKKITVTGTLWNGNKIIDERLITPDGSMLFRVTINPVA

SEQ ID NO: 975 - DNA, 483 bp, Artificial Sequence
  Synthetic
atggtcttcacactcgaagatttcgttggggactgggaacagacagccgcctacaacctggaccaagtccttgaacagggaggtgtgtccagtttgtttcagaatctcgccgtgtccgtaactccgatccaaaggattgtcctgagcggtgaaaatgccctgaagatcgacatccatgtcatcatcccgtatgaaggtctgagcgccgaccaaatggcccagatcgaaaaaatttttaaggtggtgtaccctgtggatgatcatcactttaaggtgatcctgcactatggcacactggtaatcgacggggttacgccgaacatgatcaactatttcggacggccgtatgaaggcatcgccgtgttcgacggcaaaaagatcactgtaacagggaccctgtggaacggcaacaaaattatcgacgagcgcctgatcacccccgacggctccatgctgttccgagtaaccatcaaccccgccacc

SEQ ID NO: 976 - protein, 161 aa, Artificial Sequence
  Synthetic
MVFTLEDFVGDWEQTAAYNLDQVLEQGGVSSLFQNLAVSVTPIQRIVLSGENALKIDIHVIIPYEGLSADQMAQIEKIFKVVYPVDDHHFKVILHYGTLVIDGVTPNMINYFGRPYEGIAVFDGKKITVTGTLWNGNKIIDERLITPDGSMLFRVTINPAT

SEQ ID NO: 977 - DNA, 483 bp, Artificial Sequence
  Synthetic
atggtcttcacactcgaagatttcgttggggactgggaacagacagccgcctacaacctggaccaagtccttgaacagggaggtgtgtccagtttgtttcagaatctcgccgtgtccgtaactccgatccaaaggattgtcctgagcggtgaaaatgccctgaagatcgacatccatgtcatcatcccgtatgaaggtctgagcgccgaccaaatggcccagatcgaaaaaatttttaaggtggtgtaccctgtggatgatcatcactttaaggtgatcctgcactatggcacactggtaatcgacggggttacgccgaacatgatcaactatttcggacggccgtatgaaggcatcgccgtgttcgacggcaaaaagatcactgtaacagggaccctgtggaacggcaacaaaattatcgacgagcgcctgatcacccccgacggctccatgctgttccgagtaaccatcaaccccgccgcc

SEQ ID NO: 978 - protein, 161 aa, Artificial Sequence
  Synthetic
MVFTLEDFVGDWEQTAAYNLDQVLEQGGVSSLFQNLAVSVTPIQRIVLSGENALKIDIHVIIPYEGLSADQMAQIEKIFKVVYPVDDHHFKVILHYGTLVIDGVTPNMINYFGRPYEGIAVFDGKKITVTGTLWNGNKIIDERLITPDGSMLFRVTINPAA

SEQ ID NO: 979 - DNA, 483 bp, Artificial Sequence
  Synthetic
atggtcttcacactcgaagatttcgttggggactgggaacagacagccgcctacaacctggaccaagtccttgaacagggaggtgtgtccagtttgtttcagaatctcgccgtgtccgtaactccgatccaaaggattgtcctgagcggtgaaaatgccctgaagatcgacatccatgtcatcatcccgtatgaaggtctgagcgccgaccaaatggcccagatcgaaaaaatttttaaggtggtgtaccctgtggatgatcatcactttaaggtgatcctgcactatggcacactggtaatcgacggggttacgccgaacatgatcaactatttcggacggccgtatgaaggcatcgccgtgttcgacggcaaaaagatcactgtaacagggaccctgtggaacggcaacaaaattatcgacgagcgcctgatcacccccgacggctccatgctgttccgagtaaccatcaaccccggcggc

SEQ ID NO: 980 - protein, 161 aa, Artificial Sequence
  Synthetic
MVFTLEDFVGDWEQTAAYNLDQVLEQGGVSSLFQNLAVSVTPIQRIVLSGENALKIDIHVIIPYEGLSADQMAQIEKIFKVVYPVDDHHFKVILHYGTLVIDGVTPNMINYFGRPYEGIAVFDGKKITVTGTLWNGNKIIDERLITPDGSMLFRVTINPGG

SEQ ID NO: 981 - DNA, 483 bp, Artificial Sequence
  Synthetic
atggtcttcacactcgaagatttcgttggggactgggaacagacagccgcctacaacctggaccaagtccttgaacagggaggtgtgtccagtttgtttcagaatctcgccgtgtccgtaactccgatccaaaggattgtcctgagcggtgaaaatgccctgaagatcgacatccatgtcatcatcccgtatgaaggtctgagcgccgaccaaatggcccagatcgaaaaaatttttaaggtggtgtaccctgtggatgatcatcactttaaggtgatcctgcactatggcacactggtaatcgacggggttacgccgaacatgatcaactatttcggacggccgtatgaaggcatcgccgtgttcgacggcaaaaagatcactgtaacagggaccctgtggaacggcaacaaaattatcgacgagcgcctgatcacccccgacggctccatgctgttccgagtaaccatcaaccccggcacc

SEQ ID NO: 982 - protein, 161 aa, Artificial Sequence
  Synthetic
MVFTLEDFVGDWEQTAAYNLDQVLEQGGVSSLFQNLAVSVTPIQRIVLSGENALKIDIHVIIPYEGLSADQMAQIEKIFKVVYPVDDHHFKVILHYGTLVIDGVTPNMINYFGRPYEGIAVFDGKKITVTGTLWNGNKIIDERLITPDGSMLFRVTINPGT

SEQ ID NO: 983 - DNA, 486 bp, Artificial Sequence
  Synthetic
atggtcttcacactcgaagatttcgttggggactgggaacagacagccgcctacaacctggaccaagtccttgaacagggaggtgtgtccagtttgtttcagaatctcgccgtgtccgtaactccgatccaaaggattgtcctgagcggtgaaaatgccctgaagatcgacatccatgtcatcatcccgtatgaaggtctgagcgccgaccaaatggcccagatcgaaaaaatttttaaggtggtgtaccctgtggatgatcatcactttaaggtgatcctgcactatggcacactggtaatcgacggggttacgccgaacatgatcaactatttcggacggccgtatgaaggcatcgccgtgttcgacggcaaaaagatcactgtaacagggaccctgtggaacggcaacaaaattatcgacgagcgcctgatcacccccgacggctccatgctgttccgagtaaccatcaaccccgccaccggc

SEQ ID NO: 984 - protein, 162 aa, Artificial Sequence
  Synthetic
MVFTLEDFVGDWEQTAAYNLDQVLEQGGVSSLFQNLAVSVTPIQRIVLSGENALKIDIHVIIPYEGLSADQMAQIEKIFKVVYPVDDHHFKVILHYGTLVIDGVTPNMINYFGRPYEGIAVFDGKKITVTGTLWNGNKIIDERLITPDGSMLFRVTINPATG

SEQ ID NO: 985 - DNA, 486 bp, Artificial Sequence
  Synthetic
atggtcttcacactcgaagatttcgttggggactgggaacagacagccgcctacaacctggaccaagtccttgaacagggaggtgtgtccagtttgtttcagaatctcgccgtgtccgtaactccgatccaaaggattgtcctgagcggtgaaaatgccctgaagatcgacatccatgtcatcatcccgtatgaaggtctgagcgccgaccaaatggcccagatcgaaaaaatttttaaggtggtgtaccctgtggatgatcatcactttaaggtgatcctgcactatggcacactggtaatcgacggggttacgccgaacatgatcaactatttcggacggccgtatgaaggcatcgccgtgttcgacggcaaaaagatcactgtaacagggaccctgtggaacggcaacaaaattatcgacgagcgcctgatcacccccgacggctccatgctgttccgagtaaccatcaaccccgtgaccggc

SEQ ID NO: 986 - protein, 162 aa, Artificial Sequence
  Synthetic
MVFTLEDFVGDWEQTAAYNLDQVLEQGGVSSLFQNLAVSVTPIQRIVLSGENALKIDIHVIIPYEGLSADQMAQIEKIFKVVYPVDDHHFKVILHYGTLVIDGVTPNMINYFGRPYEGIAVFDGKKITVTGTLWNGNKIIDERLITPDGSMLFRVTINPVTG

SEQ ID NO: 987 - DNA, 486 bp, Artificial Sequence
  Synthetic
atggtcttcacactcgaagatttcgttggggactgggaacagacagccgcctacaacctggaccaagtccttgaacagggaggtgtgtccagtttgtttcagaatctcgccgtgtccgtaactccgatccaaaggattgtcctgagcggtgaaaatgccctgaagatcgacatccatgtcatcatcccgtatgaaggtctgagcgccgaccaaatggcccagatcgaaaaaatttttaaggtggtgtaccctgtggatgatcatcactttaaggtgatcctgcactatggcacactggtaatcgacggggttacgccgaacatgatcaactatttcggacggccgtatgaaggcatcgccgtgttcgacggcaaaaagatcactgtaacagggaccctgtggaacggcaacaaaattatcgacgagcgcctgatcacccccgacggctccatgctgttccgagtaaccatcaaccccgtgaccgcc

SEQ ID NO: 988 - protein, 162 aa, Artificial Sequence
  Synthetic
MVFTLEDFVGDWEQTAAYNLDQVLEQGGVSSLFQNLAVSVTPIQRIVLSGENALKIDIHVIIPYEGLSADQMAQIEKIFKVVYPVDDHHFKVILHYGTLVIDGVTPNMINYFGRPYEGIAVFDGKKITVTGTLWNGNKIIDERLITPDGSMLFRVTINPVTA

SEQ ID NO: 989 - DNA, 486 bp, Artificial Sequence
  Synthetic
atggtcttcacactcgaagatttcgttggggactgggaacagacagccgcctacaacctggaccaagtccttgaacagggaggtgtgtccagtttgtttcagaatctcgccgtgtccgtaactccgatccaaaggattgtcctgagcggtgaaaatgccctgaagatcgacatccatgtcatcatcccgtatgaaggtctgagcgccgaccaaatggcccagatcgaaaaaatttttaaggtggtgtaccctgtggatgatcatcactttaaggtgatcctgcactatggcacactggtaatcgacggggttacgccgaacatgatcaactatttcggacggccgtatgaaggcatcgccgtgttcgacggcaaaaagatcactgtaacagggaccctgtggaacggcaacaaaattatcgacgagcgcctgatcacccccgacggctccatgctgttccgagtaaccatcaaccccggcaccgcc

SEQ ID NO: 990 - protein, 162 aa, Artificial Sequence
  Synthetic
MVFTLEDFVGDWEQTAAYNLDQVLEQGGVSSLFQNLAVSVTPIQRIVLSGENALKIDIHVIIPYEGLSADQMAQIEKIFKVVYPVDDHHFKVILHYGTLVIDGVTPNMINYFGRPYEGIAVFDGKKITVTGTLWNGNKIIDERLITPDGSMLFRVTINPGTA

SEQ ID NO: 991 - DNA, 489 bp, Artificial Sequence
  Synthetic
atggtcttcacactcgaagatttcgttggggactgggaacagacagccgcctacaacctggaccaagtccttgaacagggaggtgtgtccagtttgtttcagaatctcgccgtgtccgtaactccgatccaaaggattgtcctgagcggtgaaaatgccctgaagatcgacatccatgtcatcatcccgtatgaaggtctgagcgccgaccaaatggcccagatcgaaaaaatttttaaggtggtgtaccctgtggatgatcatcactttaaggtgatcctgcactatggcacactggtaatcgacggggttacgccgaacatgatcaactatttcggacggccgtatgaaggcatcgccgtgttcgacggcaaaaagatcactgtaacagggaccctgtggaacggcaacaaaattatcgacgagcgcctgatcacccccgacggctccatgctgttccgagtaaccatcaaccccgtgaccggctgg

SEQ ID NO: 992 - protein, 163 aa, Artificial Sequence
  Synthetic
MVFTLEDFVGDWEQTAAYNLDQVLEQGGVSSLFQNLAVSVTPIQRIVLSGENALKIDIHVIIPYEGLSADQMAQIEKIFKVVYPVDDHHFKVILHYGTLVIDGVTPNMINYFGRPYEGIAVFDGKKITVTGTLWNGNKIIDERLITPDGSMLFRVTINPVTGW

SEQ ID NO: 993 - DNA, 492 bp, Artificial Sequence
  Synthetic
atggtcttcacactcgaagatttcgttggggactgggaacagacagccgcctacaacctggaccaagtccttgaacagggaggtgtgtccagtttgtttcagaatctcgccgtgtccgtaactccgatccaaaggattgtcctgagcggtgaaaatgccctgaagatcgacatccatgtcatcatcccgtatgaaggtctgagcgccgaccaaatggcccagatcgaaaaaatttttaaggtggtgtaccctgtggatgatcatcactttaaggtgatcctgcactatggcacactggtaatcgacggggttacgccgaacatgatcaactatttcggacggccgtatgaaggcatcgccgtgttcgacggcaaaaagatcactgtaacagggaccctgtggaacggcaacaaaattatcgacgagcgcctgatcacccccgacggctccatgctgttccgagtaaccatcaaccccgtgaccggctggcgg

SEQ ID NO: 994 - protein, 164 aa, Artificial Sequence
  Synthetic
MVFTLEDFVGDWEQTAAYNLDQVLEQGGVSSLFQNLAVSVTPIQRIVLSGENALKIDIHVIIPYEGLSADQMAQIEKIFKVVYPVDDHHFKVILHYGTLVIDGVTPNMINYFGRPYEGIAVFDGKKITVTGTLWNGNKIIDERLITPDGSMLFRVTINPVTGWR

SEQ ID NO: 995 - DNA, 492 bp, Artificial Sequence
  Synthetic
atggtcttcacactcgaagatttcgttggggactgggaacagacagccgcctacaacctggaccaagtccttgaacagggaggtgtgtccagtttgtttcagaatctcgccgtgtccgtaactccgatccaaaggattgtcctgagcggtgaaaatgccctgaagatcgacatccatgtcatcatcccgtatgaaggtctgagcgccgaccaaatggcccagatcgaaaaaatttttaaggtggtgtaccctgtggatgatcatcactttaaggtgatcctgcactatggcacactggtaatcgacggggttacgccgaacatgatcaactatttcggacggccgtatgaaggcatcgccgtgttcgacggcaaaaagatcactgtaacagggaccctgtggaacggcaacaaaattatcgacgagcgcctgatcacccccgacggctccatgctgttccgagtaaccatcaaccccgtgaccggctgggag

SEQ ID NO: 996 - protein, 164 aa, Artificial Sequence
  Synthetic
MVFTLEDFVGDWEQTAAYNLDQVLEQGGVSSLFQNLAVSVTPIQRIVLSGENALKIDIHVIIPYEGLSADQMAQIEKIFKVVYPVDDHHFKVILHYGTLVIDGVTPNMINYFGRPYEGIAVFDGKKITVTGTLWNGNKIIDERLITPDGSMLFRVTINPVTGWE

SEQ ID NO: 997 - DNA, 492 bp, Artificial Sequence
  Synthetic
atggtcttcacactcgaagatttcgttggggactgggaacagacagccgcctacaacctggaccaagtccttgaacagggaggtgtgtccagtttgtttcagaatctcgccgtgtccgtaactccgatccaaaggattgtcctgagcggtgaaaatgccctgaagatcgacatccatgtcatcatcccgtatgaaggtctgagcgccgaccaaatggcccagatcgaaaaaatttttaaggtggtgtaccctgtggatgatcatcactttaaggtgatcctgcactatggcacactggtaatcgacggggttacgccgaacatgatcaactatttcggacggccgtatgaaggcatcgccgtgttcgacggcaaaaagatcactgtaacagggaccctgtggaacggcaacaaaattatcgacgagcgcctgatcacccccgacggctccatgctgttccgagtaaccatcaaccccgtgaccggctggaag

SEQ ID NO: 998 - protein, 164 aa, Artificial Sequence
  Synthetic
MVFTLEDFVGDWEQTAAYNLDQVLEQGGVSSLFQNLAVSVTPIQRIVLSGENALKIDIHVIIPYEGLSADQMAQIEKIFKVVYPVDDHHFKVILHYGTLVIDGVTPNMINYFGRPYEGIAVFDGKKITVTGTLWNGNKIIDERLITPDGSMLFRVTINPVTGWK

SEQ ID NO: 999 - DNA, 492 bp, Artificial Sequence
  Synthetic
atggtcttcacactcgaagatttcgttggggactgggaacagacagccgcctacaacctggaccaagtccttgaacagggaggtgtgtccagtttgtttcagaatctcgccgtgtccgtaactccgatccaaaggattgtcctgagcggtgaaaatgccctgaagatcgacatccatgtcatcatcccgtatgaaggtctgagcgccgaccaaatggcccagatcgaaaaaatttttaaggtggtgtaccctgtggatgatcatcactttaaggtgatcctgcactatggcacactggtaatcgacggggttacgccgaacatgatcaactatttcggacggccgtatgaaggcatcgccgtgttcgacggcaaaaagatcactgtaacagggaccctgtggaacggcaacaaaattatcgacgagcgcctgatcacccccgacggctccatgctgttccgagtaaccatcaaccccgtgaccggctggcag

SEQ ID NO: 1000 - protein, 164 aa, Artificial Sequence
  Synthetic
MVFTLEDFVGDWEQTAAYNLDQVLEQGGVSSLFQNLAVSVTPIQRIVLSGENALKIDIHVIIPYEGLSADQMAQIEKIFKVVYPVDDHHFKVILHYGTLVIDGVTPNMINYFGRPYEGIAVFDGKKITVTGTLWNGNKIIDERLITPDGSMLFRVTINPVTGWQ

SEQ ID NO: 1001 - DNA, 492 bp, Artificial Sequence
  Synthetic
atggtcttcacactcgaagatttcgttggggactgggaacagacagccgcctacaacctggaccaagtccttgaacagggaggtgtgtccagtttgtttcagaatctcgccgtgtccgtaactccgatccaaaggattgtcctgagcggtgaaaatgccctgaagatcgacatccatgtcatcatcccgtatgaaggtctgagcgccgaccaaatggcccagatcgaaaaaatttttaaggtggtgtaccctgtggatgatcatcactttaaggtgatcctgcactatggcacactggtaatcgacggggttacgccgaacatgatcaactatttcggacggccgtatgaaggcatcgccgtgttcgacggcaaaaagatcactgtaacagggaccctgtggaacggcaacaaaattatcgacgagcgcctgatcacccccgacggctccatgctgttccgagtaaccatcaaccccgtgaccggctggcac

SEQ ID NO: 1002 - protein, 164 aa, Artificial Sequence
  Synthetic
MVFTLEDFVGDWEQTAAYNLDQVLEQGGVSSLFQNLAVSVTPIQRIVLSGENALKIDIHVIIPYEGLSADQMAQIEKIFKVVYPVDDHHFKVILHYGTLVIDGVTPNMINYFGRPYEGIAVFDGKKITVTGTLWNGNKIIDERLITPDGSMLFRVTINPVTGWH

SEQ ID NO: 1003 - DNA, 474 bp, Artificial Sequence
  Synthetic
atggtcttcacactcgaagatttcgttggggactgggaacagacagccgcctacaacctggaccaagtccttgaacagggaggtgtgtccagtttgtttcagaatctcgccgtgtccgtaactccgatccaaaggattgtcctgagcggtgaaaatgccctgaagatcgacatccatgtcatcatcccgtatgaaggtctgagcgccgaccaaatggcccagatcgaaaaaatttttaaggtggtgtaccctgtggatgatcatcactttaaggtgatcctgcactatggcacactggtaatcgacggggttacgccgaacatgatcaactatttcggacggccgtatgaaggcatcgccgtgttcgacggcaaaaagatcactgtaacagggaccctgtggaacggcaacaaaattatcgacgagcgcctgatcacccccgacggctccatgctgttccgagtaaccatcaac

SEQ ID NO: 1004 - protein, 158 aa, Artificial Sequence
  Synthetic
MVFTLEDFVGDWEQTAAYNLDQVLEQGGVSSLFQNLAVSVTPIQRIVLSGENALKIDIHVIIPYEGLSADQMAQIEKIFKVVYPVDDHHFKVILHYGTLVIDGVTPNMINYFGRPYEGIAVFDGKKITVTGTLWNGNKIIDERLITPDGSMLFRVTIN

SEQ ID NO: 1005 - DNA, 471 bp, Artificial Sequence
  Synthetic
atggtcttcacactcgaagatttcgttggggactgggaacagacagccgcctacaacctggaccaagtccttgaacagggaggtgtgtccagtttgtttcagaatctcgccgtgtccgtaactccgatccaaaggattgtcctgagcggtgaaaatgccctgaagatcgacatccatgtcatcatcccgtatgaaggtctgagcgccgaccaaatggcccagatcgaaaaaatttttaaggtggtgtaccctgtggatgatcatcactttaaggtgatcctgcactatggcacactggtaatcgacggggttacgccgaacatgatcaactatttcggacggccgtatgaaggcatcgccgtgttcgacggcaaaaagatcactgtaacagggaccctgtggaacggcaacaaaattatcgacgagcgcctgatcacccccgacggctccatgctgttccgagtaaccatc

SEQ ID NO: 1006 - protein, 157 aa, Artificial Sequence
  Synthetic
MVFTLEDFVGDWEQTAAYNLDQVLEQGGVSSLFQNLAVSVTPIQRIVLSGENALKIDIHVIIPYEGLSADQMAQIEKIFKVVYPVDDHHFKVILHYGTLVIDGVTPNMINYFGRPYEGIAVFDGKKITVTGTLWNGNKIIDERLITPDGSMLFRVTI

SEQ ID NO: 1007 - DNA, 468 bp, Artificial Sequence
  Synthetic
atggtcttcacactcgaagatttcgttggggactgggaacagacagccgcctacaacctggaccaagtccttgaacagggaggtgtgtccagtttgtttcagaatctcgccgtgtccgtaactccgatccaaaggattgtcctgagcggtgaaaatgccctgaagatcgacatccatgtcatcatcccgtatgaaggtctgagcgccgaccaaatggcccagatcgaaaaaatttttaaggtggtgtaccctgtggatgatcatcactttaaggtgatcctgcactatggcacactggtaatcgacggggttacgccgaacatgatcaactatttcggacggccgtatgaaggcatcgccgtgttcgacggcaaaaagatcactgtaacagggaccctgtggaacggcaacaaaattatcgacgagcgcctgatcacccccgacggctccatgctgttccgagtaacc

SEQ ID NO: 1008 - protein, 156 aa, Artificial Sequence
  Synthetic
MVFTLEDFVGDWEQTAAYNLDQVLEQGGVSSLFQNLAVSVTPIQRIVLSGENALKIDIHVIIPYEGLSADQMAQIEKIFKVVYPVDDHHFKVILHYGTLVIDGVTPNMINYFGRPYEGIAVFDGKKITVTGTLWNGNKIIDERLITPDGSMLFRVT

SEQ ID NO: 1009 - DNA, 465 bp, Artificial Sequence
  Synthetic
atggtcttcacactcgaagatttcgttggggactgggaacagacagccgcctacaacctggaccaagtccttgaacagggaggtgtgtccagtttgtttcagaatctcgccgtgtccgtaactccgatccaaaggattgtcctgagcggtgaaaatgccctgaagatcgacatccatgtcatcatcccgtatgaaggtctgagcgccgaccaaatggcccagatcgaaaaaatttttaaggtggtgtaccctgtggatgatcatcactttaaggtgatcctgcactatggcacactggtaatcgacggggttacgccgaacatgatcaactatttcggacggccgtatgaaggcatcgccgtgttcgacggcaaaaagatcactgtaacagggaccctgtggaacggcaacaaaattatcgacgagcgcctgatcacccccgacggctccatgctgttccgagta

SEQ ID NO: 1010 - protein, 155 aa, Artificial Sequence
  Synthetic
MVFTLEDFVGDWEQTAAYNLDQVLEQGGVSSLFQNLAVSVTPIQRIVLSGENALKIDIHVIIPYEGLSADQMAQIEKIFKVVYPVDDHHFKVILHYGTLVIDGVTPNMINYFGRPYEGIAVFDGKKITVTGTLWNGNKIIDERLITPDGSMLFRV

SEQ ID NO: 1011 - DNA, 462 bp, Artificial Sequence
  Synthetic
atggtcttcacactcgaagatttcgttggggactgggaacagacagccgcctacaacctggaccaagtccttgaacagggaggtgtgtccagtttgtttcagaatctcgccgtgtccgtaactccgatccaaaggattgtcctgagcggtgaaaatgccctgaagatcgacatccatgtcatcatcccgtatgaaggtctgagcgccgaccaaatggcccagatcgaaaaaatttttaaggtggtgtaccctgtggatgatcatcactttaaggtgatcctgcactatggcacactggtaatcgacggggttacgccgaacatgatcaactatttcggacggccgtatgaaggcatcgccgtgttcgacggcaaaaagatcactgtaacagggaccctgtggaacggcaacaaaattatcgacgagcgcctgatcacccccgacggctccatgctgttccga

SEQ ID NO: 1012 - protein, 154 aa, Artificial Sequence
  Synthetic
MVFTLEDFVGDWEQTAAYNLDQVLEQGGVSSLFQNLAVSVTPIQRIVLSGENALKIDIHVIIPYEGLSADQMAQIEKIFKVVYPVDDHHFKVILHYGTLVIDGVTPNMINYFGRPYEGIAVFDGKKITVTGTLWNGNKIIDERLITPDGSMLFR

SEQ ID NO: 1013 - DNA, 459 bp, Artificial Sequence
  Synthetic
atggtcttcacactcgaagatttcgttggggactgggaacagacagccgcctacaacctggaccaagtccttgaacagggaggtgtgtccagtttgtttcagaatctcgccgtgtccgtaactccgatccaaaggattgtcctgagcggtgaaaatgccctgaagatcgacatccatgtcatcatcccgtatgaaggtctgagcgccgaccaaatggcccagatcgaaaaaatttttaaggtggtgtaccctgtggatgatcatcactttaaggtgatcctgcactatggcacactggtaatcgacggggttacgccgaacatgatcaactatttcggacggccgtatgaaggcatcgccgtgttcgacggcaaaaagatcactgtaacagggaccctgtggaacggcaacaaaattatcgacgagcgcctgatcacccccgacggctccatgctgttc

SEQ ID NO: 1014 - protein, 153 aa, Artificial Sequence
  Synthetic
MVFTLEDFVGDWEQTAAYNLDQVLEQGGVSSLFQNLAVSVTPIQRIVLSGENALKIDIHVIIPYEGLSADQMAQIEKIFKVVYPVDDHHFKVILHYGTLVIDGVTPNMINYFGRPYEGIAVFDGKKITVTGTLWNGNKIIDERLITPDGSMLF

SEQ ID NO: 1015 - DNA, 456 bp, Artificial Sequence
  Synthetic
atggtcttcacactcgaagatttcgttggggactgggaacagacagccgcctacaacctggaccaagtccttgaacagggaggtgtgtccagtttgtttcagaatctcgccgtgtccgtaactccgatccaaaggattgtcctgagcggtgaaaatgccctgaagatcgacatccatgtcatcatcccgtatgaaggtctgagcgccgaccaaatggcccagatcgaaaaaatttttaaggtggtgtaccctgtggatgatcatcactttaaggtgatcctgcactatggcacactggtaatcgacggggttacgccgaacatgatcaactatttcggacggccgtatgaaggcatcgccgtgttcgacggcaaaaagatcactgtaacagggaccctgtggaacggcaacaaaattatcgacgagcgcctgatcacccccgacggctccatgctg

SEQ ID NO: 1016 - protein, 152 aa, Artificial Sequence
  Synthetic
MVFTLEDFVGDWEQTAAYNLDQVLEQGGVSSLFQNLAVSVTPIQRIVLSGENALKIDIHVIIPYEGLSADQMAQIEKIFKVVYPVDDHHFKVILHYGTLVIDGVTPNMINYFGRPYEGIAVFDGKKITVTGTLWNGNKIIDERLITPDGSML

SEQ ID NO: 1017 - DNA, 477 bp, Artificial Sequence
  Synthetic
atggtcttcacactcgaagatttcgttggggactgggaacagacagccgcctacaacctggaccaagtccttgaacagggaggtgtgtccagtttggcccagaatctcgccgtgtccgtaactccgatccaaaggattgtcctgagcggtgaaaatgccctgaagatcgacatccatgtcatcatcccgtatgaaggtctgagcgccgaccaaatggcccagatcgaaaaaatttttaaggtggtgtaccctgtggatgatcatcactttaaggtgatcctgcactatggcacactggtaatcgacggggttacgccgaacatgatcaactatttcggacggccgtatgaaggcatcgccgtgttcgacggcaaaaagatcactgtaacagggaccctgtggaacggcaacaaaattatcgacgagcgcctgatcacccccgacggctccatgctgttccgagtaaccatcaacccc

SEQ ID NO: 1018 - protein, 159 aa, Artificial Sequence
  Synthetic
MVFTLEDFVGDWEQTAAYNLDQVLEQGGVSSLAQNLAVSVTPIQRIVLSGENALKIDIHVIIPYEGLSADQMAQIEKIFKVVYPVDDHHFKVILHYGTLVIDGVTPNMINYFGRPYEGIAVFDGKKITVTGTLWNGNKIIDERLITPDGSMLFRVTINP

SEQ ID NO: 1019 - DNA, 477 bp, Artificial Sequence
  Synthetic
atggtcttcacactcgaagatttcgttggggactgggaacagacagccgcctacaacctggaccaagtccttgaacagggaggtgtgtccagtttgtgccagaatctcgccgtgtccgtaactccgatccaaaggattgtcctgagcggtgaaaatgccctgaagatcgacatccatgtcatcatcccgtatgaaggtctgagcgccgaccaaatggcccagatcgaaaaaatttttaaggtggtgtaccctgtggatgatcatcactttaaggtgatcctgcactatggcacactggtaatcgacggggttacgccgaacatgatcaactatttcggacggccgtatgaaggcatcgccgtgttcgacggcaaaaagatcactgtaacagggaccctgtggaacggcaacaaaattatcgacgagcgcctgatcacccccgacggctccatgctgttccgagtaaccatcaacccc

SEQ ID NO: 1020 - protein, 159 aa, Artificial Sequence
  Synthetic
MVFTLEDFVGDWEQTAAYNLDQVLEQGGVSSLCQNLAVSVTPIQRIVLSGENALKIDIHVIIPYEGLSADQMAQIEKIFKVVYPVDDHHFKVILHYGTLVIDGVTPNMINYFGRPYEGIAVFDGKKITVTGTLWNGNKIIDERLITPDGSMLFRVTINP

SEQ ID NO: 1021 - DNA, 477 bp, Artificial Sequence
  Synthetic
atggtcttcacactcgaagatttcgttggggactgggaacagacagccgcctacaacctggaccaagtccttgaacagggaggtgtgtccagtttggaccagaatctcgccgtgtccgtaactccgatccaaaggattgtcctgagcggtgaaaatgccctgaagatcgacatccatgtcatcatcccgtatgaaggtctgagcgccgaccaaatggcccagatcgaaaaaatttttaaggtggtgtaccctgtggatgatcatcactttaaggtgatcctgcactatggcacactggtaatcgacggggttacgccgaacatgatcaactatttcggacggccgtatgaaggcatcgccgtgttcgacggcaaaaagatcactgtaacagggaccctgtggaacggcaacaaaattatcgacgagcgcctgatcacccccgacggctccatgctgttccgagtaaccatcaacccc

SEQ ID NO: 1022 - protein, 159 aa, Artificial Sequence
  Synthetic
MVFTLEDFVGDWEQTAAYNLDQVLEQGGVSSLDQNLAVSVTPIQRIVLSGENALKIDIHVIIPYEGLSADQMAQIEKIFKVVYPVDDHHFKVILHYGTLVIDGVTPNMINYFGRPYEGIAVFDGKKITVTGTLWNGNKIIDERLITPDGSMLFRVTINP

SEQ ID NO: 1023 - DNA, 477 bp, Artificial Sequence
  Synthetic
atggtcttcacactcgaagatttcgttggggactgggaacagacagccgcctacaacctggaccaagtccttgaacagggaggtgtgtccagtttggagcagaatctcgccgtgtccgtaactccgatccaaaggattgtcctgagcggtgaaaatgccctgaagatcgacatccatgtcatcatcccgtatgaaggtctgagcgccgaccaaatggcccagatcgaaaaaatttttaaggtggtgtaccctgtggatgatcatcactttaaggtgatcctgcactatggcacactggtaatcgacggggttacgccgaacatgatcaactatttcggacggccgtatgaaggcatcgccgtgttcgacggcaaaaagatcactgtaacagggaccctgtggaacggcaacaaaattatcgacgagcgcctgatcacccccgacggctccatgctgttccgagtaaccatcaacccc

SEQ ID NO: 1024 - protein, 159 aa, Artificial Sequence
  Synthetic
MVFTLEDFVGDWEQTAAYNLDQVLEQGGVSSLEQNLAVSVTPIQRIVLSGENALKIDIHVIIPYEGLSADQMAQIEKIFKVVYPVDDHHFKVILHYGTLVIDGVTPNMINYFGRPYEGIAVFDGKKITVTGTLWNGNKIIDERLITPDGSMLFRVTINP

SEQ ID NO: 1025 - DNA, 477 bp, Artificial Sequence
  Synthetic
atggtcttcacactcgaagatttcgttggggactgggaacagacagccgcctacaacctggaccaagtccttgaacagggaggtgtgtccagtttgggccagaatctcgccgtgtccgtaactccgatccaaaggattgtcctgagcggtgaaaatgccctgaagatcgacatccatgtcatcatcccgtatgaaggtctgagcgccgaccaaatggcccagatcgaaaaaatttttaaggtggtgtaccctgtggatgatcatcactttaaggtgatcctgcactatggcacactggtaatcgacggggttacgccgaacatgatcaactatttcggacggccgtatgaaggcatcgccgtgttcgacggcaaaaagatcactgtaacagggaccctgtggaacggcaacaaaattatcgacgagcgcctgatcacccccgacggctccatgctgttccgagtaaccatcaacccc

SEQ ID NO: 1026 - protein, 159 aa, Artificial Sequence
  Synthetic
MVFTLEDFVGDWEQTAAYNLDQVLEQGGVSSLGQNLAVSVTPIQRIVLSGENALKIDIHVIIPYEGLSADQMAQIEKIFKVVYPVDDHHFKVILHYGTLVIDGVTPNMINYFGRPYEGIAVFDGKKITVTGTLWNGNKIIDERLITPDGSMLFRVTINP

SEQ ID NO: 1027 - DNA, 477 bp, Artificial Sequence
  Synthetic
atggtcttcacactcgaagatttcgttggggactgggaacagacagccgcctacaacctggaccaagtccttgaacagggaggtgtgtccagtttgcaccagaatctcgccgtgtccgtaactccgatccaaaggattgtcctgagcggtgaaaatgccctgaagatcgacatccatgtcatcatcccgtatgaaggtctgagcgccgaccaaatggcccagatcgaaaaaatttttaaggtggtgtaccctgtggatgatcatcactttaaggtgatcctgcactatggcacactggtaatcgacggggttacgccgaacatgatcaactatttcggacggccgtatgaaggcatcgccgtgttcgacggcaaaaagatcactgtaacagggaccctgtggaacggcaacaaaattatcgacgagcgcctgatcacccccgacggctccatgctgttccgagtaaccatcaacccc

SEQ ID NO: 1028 - protein, 159 aa, Artificial Sequence
  Synthetic
MVFTLEDFVGDWEQTAAYNLDQVLEQGGVSSLHQNLAVSVTPIQRIVLSGENALKIDIHVIIPYEGLSADQMAQIEKIFKVVYPVDDHHFKVILHYGTLVIDGVTPNMINYFGRPYEGIAVFDGKKITVTGTLWNGNKIIDERLITPDGSMLFRVTINP

SEQ ID NO: 1029 - DNA, 477 bp, Artificial Sequence
  Synthetic
atggtcttcacactcgaagatttcgttggggactgggaacagacagccgcctacaacctggaccaagtccttgaacagggaggtgtgtccagtttgatccagaatctcgccgtgtccgtaactccgatccaaaggattgtcctgagcggtgaaaatgccctgaagatcgacatccatgtcatcatcccgtatgaaggtctgagcgccgaccaaatggcccagatcgaaaaaatttttaaggtggtgtaccctgtggatgatcatcactttaaggtgatcctgcactatggcacactggtaatcgacggggttacgccgaacatgatcaactatttcggacggccgtatgaaggcatcgccgtgttcgacggcaaaaagatcactgtaacagggaccctgtggaacggcaacaaaattatcgacgagcgcctgatcacccccgacggctccatgctgttccgagtaaccatcaacccc

SEQ ID NO: 1030 - protein, 159 aa, Artificial Sequence
  Synthetic
MVFTLEDFVGDWEQTAAYNLDQVLEQGGVSSLIQNLAVSVTPIQRIVLSGENALKIDIHVIIPYEGLSADQMAQIEKIFKVVYPVDDHHFKVILHYGTLVIDGVTPNMINYFGRPYEGIAVFDGKKITVTGTLWNGNKIIDERLITPDGSMLFRVTINP

SEQ ID NO: 1031 - DNA, 477 bp, Artificial Sequence
  Synthetic
atggtcttcacactcgaagatttcgttggggactgggaacagacagccgcctacaacctggaccaagtccttgaacagggaggtgtgtccagtttgaagcagaatctcgccgtgtccgtaactccgatccaaaggattgtcctgagcggtgaaaatgccctgaagatcgacatccatgtcatcatcccgtatgaaggtctgagcgccgaccaaatggcccagatcgaaaaaatttttaaggtggtgtaccctgtggatgatcatcactttaaggtgatcctgcactatggcacactggtaatcgacggggttacgccgaacatgatcaactatttcggacggccgtatgaaggcatcgccgtgttcgacggcaaaaagatcactgtaacagggaccctgtggaacggcaacaaaattatcgacgagcgcctgatcacccccgacggctccatgctgttccgagtaaccatcaacccc

SEQ ID NO: 1032 - protein, 159 aa, Artificial Sequence
  Synthetic
MVFTLEDFVGDWEQTAAYNLDQVLEQGGVSSLKQNLAVSVTPIQRIVLSGENALKIDIHVIIPYEGLSADQMAQIEKIFKVVYPVDDHHFKVILHYGTLVIDGVTPNMINYFGRPYEGIAVFDGKKITVTGTLWNGNKIIDERLITPDGSMLFRVTINP

SEQ ID NO: 1033 - DNA, 477 bp, Artificial Sequence
  Synthetic
atggtcttcacactcgaagatttcgttggggactgggaacagacagccgcctacaacctggaccaagtccttgaacagggaggtgtgtccagtttgctgcagaatctcgccgtgtccgtaactccgatccaaaggattgtcctgagcggtgaaaatgccctgaagatcgacatccatgtcatcatcccgtatgaaggtctgagcgccgaccaaatggcccagatcgaaaaaatttttaaggtggtgtaccctgtggatgatcatcactttaaggtgatcctgcactatggcacactggtaatcgacggggttacgccgaacatgatcaactatttcggacggccgtatgaaggcatcgccgtgttcgacggcaaaaagatcactgtaacagggaccctgtggaacggcaacaaaattatcgacgagcgcctgatcacccccgacggctccatgctgttccgagtaaccatcaacccc

SEQ ID NO: 1034 - protein, 159 aa, Artificial Sequence
  Synthetic
MVFTLEDFVGDWEQTAAYNLDQVLEQGGVSSLLQNLAVSVTPIQRIVLSGENALKIDIHVIIPYEGLSADQMAQIEKIFKVVYPVDDHHFKVILHYGTLVIDGVTPNMINYFGRPYEGIAVFDGKKITVTGTLWNGNKIIDERLITPDGSMLFRVTINP

SEQ ID NO: 1035 - DNA, 477 bp, Artificial Sequence
  Synthetic
atggtcttcacactcgaagatttcgttggggactgggaacagacagccgcctacaacctggaccaagtccttgaacagggaggtgtgtccagtttgatgcagaatctcgccgtgtccgtaactccgatccaaaggattgtcctgagcggtgaaaatgccctgaagatcgacatccatgtcatcatcccgtatgaaggtctgagcgccgaccaaatggcccagatcgaaaaaatttttaaggtggtgtaccctgtggatgatcatcactttaaggtgatcctgcactatggcacactggtaatcgacggggttacgccgaacatgatcaactatttcggacggccgtatgaaggcatcgccgtgttcgacggcaaaaagatcactgtaacagggaccctgtggaacggcaacaaaattatcgacgagcgcctgatcacccccgacggctccatgctgttccgagtaaccatcaacccc

SEQ ID NO: 1036 - protein, 159 aa, Artificial Sequence
  Synthetic
MVFTLEDFVGDWEQTAAYNLDQVLEQGGVSSLMQNLAVSVTPIQRIVLSGENALKIDIHVIIPYEGLSADQMAQIEKIFKVVYPVDDHHFKVILHYGTLVIDGVTPNMINYFGRPYEGIAVFDGKKITVTGTLWNGNKIIDERLITPDGSMLFRVTINP

SEQ ID NO: 1037 - DNA, 477 bp, Artificial Sequence
  Synthetic
atggtcttcacactcgaagatttcgttggggactgggaacagacagccgcctacaacctggaccaagtccttgaacagggaggtgtgtccagtttgaaccagaatctcgccgtgtccgtaactccgatccaaaggattgtcctgagcggtgaaaatgccctgaagatcgacatccatgtcatcatcccgtatgaaggtctgagcgccgaccaaatggcccagatcgaaaaaatttttaaggtggtgtaccctgtggatgatcatcactttaaggtgatcctgcactatggcacactggtaatcgacggggttacgccgaacatgatcaactatttcggacggccgtatgaaggcatcgccgtgttcgacggcaaaaagatcactgtaacagggaccctgtggaacggcaacaaaattatcgacgagcgcctgatcacccccgacggctccatgctgttccgagtaaccatcaacccc

SEQ ID NO: 1038 - protein, 159 aa, Artificial Sequence
  Synthetic
MVFTLEDFVGDWEQTAAYNLDQVLEQGGVSSLNQNLAVSVTPIQRIVLSGENALKIDIHVIIPYEGLSADQMAQIEKIFKVVYPVDDHHFKVILHYGTLVIDGVTPNMINYFGRPYEGIAVFDGKKITVTGTLWNGNKIIDERLITPDGSMLFRVTINP

SEQ ID NO: 1039 - DNA, 477 bp, Artificial Sequence
  Synthetic
atggtcttcacactcgaagatttcgttggggactgggaacagacagccgcctacaacctggaccaagtccttgaacagggaggtgtgtccagtttgccccagaatctcgccgtgtccgtaactccgatccaaaggattgtcctgagcggtgaaaatgccctgaagatcgacatccatgtcatcatcccgtatgaaggtctgagcgccgaccaaatggcccagatcgaaaaaatttttaaggtggtgtaccctgtggatgatcatcactttaaggtgatcctgcactatggcacactggtaatcgacggggttacgccgaacatgatcaactatttcggacggccgtatgaaggcatcgccgtgttcgacggcaaaaagatcactgtaacagggaccctgtggaacggcaacaaaattatcgacgagcgcctgatcacccccgacggctccatgctgttccgagtaaccatcaacccc

SEQ ID NO: 1040 - protein, 159 aa, Artificial Sequence
  Synthetic
MVFTLEDFVGDWEQTAAYNLDQVLEQGGVSSLPQNLAVSVTPIQRIVLSGENALKIDIHVIIPYEGLSADQMAQIEKIFKVVYPVDDHHFKVILHYGTLVIDGVTPNMINYFGRPYEGIAVFDGKKITVTGTLWNGNKIIDERLITPDGSMLFRVTINP

SEQ ID NO: 1041 - DNA, 477 bp, Artificial Sequence
  Synthetic
atggtcttcacactcgaagatttcgttggggactgggaacagacagccgcctacaacctggaccaagtccttgaacagggaggtgtgtccagtttgcagcagaatctcgccgtgtccgtaactccgatccaaaggattgtcctgagcggtgaaaatgccctgaagatcgacatccatgtcatcatcccgtatgaaggtctgagcgccgaccaaatggcccagatcgaaaaaatttttaaggtggtgtaccctgtggatgatcatcactttaaggtgatcctgcactatggcacactggtaatcgacggggttacgccgaacatgatcaactatttcggacggccgtatgaaggcatcgccgtgttcgacggcaaaaagatcactgtaacagggaccctgtggaacggcaacaaaattatcgacgagcgcctgatcacccccgacggctccatgctgttccgagtaaccatcaacccc

SEQ ID NO: 1042 - protein, 159 aa, Artificial Sequence
  Synthetic
MVFTLEDFVGDWEQTAAYNLDQVLEQGGVSSLQQNLAVSVTPIQRIVLSGENALKIDIHVIIPYEGLSADQMAQIEKIFKVVYPVDDHHFKVILHYGTLVIDGVTPNMINYFGRPYEGIAVFDGKKITVTGTLWNGNKIIDERLITPDGSMLFRVTINP

SEQ ID NO: 1043 - DNA, 477 bp, Artificial Sequence
  Synthetic
atggtcttcacactcgaagatttcgttggggactgggaacagacagccgcctacaacctggaccaagtccttgaacagggaggtgtgtccagtttgcggcagaatctcgccgtgtccgtaactccgatccaaaggattgtcctgagcggtgaaaatgccctgaagatcgacatccatgtcatcatcccgtatgaaggtctgagcgccgaccaaatggcccagatcgaaaaaatttttaaggtggtgtaccctgtggatgatcatcactttaaggtgatcctgcactatggcacactggtaatcgacggggttacgccgaacatgatcaactatttcggacggccgtatgaaggcatcgccgtgttcgacggcaaaaagatcactgtaacagggaccctgtggaacggcaacaaaattatcgacgagcgcctgatcacccccgacggctccatgctgttccgagtaaccatcaacccc

SEQ ID NO: 1044 - protein, 159 aa, Artificial Sequence
  Synthetic
MVFTLEDFVGDWEQTAAYNLDQVLEQGGVSSLRQNLAVSVTPIQRIVLSGENALKIDIHVIIPYEGLSADQMAQIEKIFKVVYPVDDHHFKVILHYGTLVIDGVTPNMINYFGRPYEGIAVFDGKKITVTGTLWNGNKIIDERLITPDGSMLFRVTINP

SEQ ID NO: 1045 - DNA, 477 bp, Artificial Sequence
  Synthetic
atggtcttcacactcgaagatttcgttggggactgggaacagacagccgcctacaacctggaccaagtccttgaacagggaggtgtgtccagtttgagccagaatctcgccgtgtccgtaactccgatccaaaggattgtcctgagcggtgaaaatgccctgaagatcgacatccatgtcatcatcccgtatgaaggtctgagcgccgaccaaatggcccagatcgaaaaaatttttaaggtggtgtaccctgtggatgatcatcactttaaggtgatcctgcactatggcacactggtaatcgacggggttacgccgaacatgatcaactatttcggacggccgtatgaaggcatcgccgtgttcgacggcaaaaagatcactgtaacagggaccctgtggaacggcaacaaaattatcgacgagcgcctgatcacccccgacggctccatgctgttccgagtaaccatcaacccc

SEQ ID NO: 1046 - protein, 159 aa, Artificial Sequence
  Synthetic
MVFTLEDFVGDWEQTAAYNLDQVLEQGGVSSLSQNLAVSVTPIQRIVLSGENALKIDIHVIIPYEGLSADQMAQIEKIFKVVYPVDDHHFKVILHYGTLVIDGVTPNMINYFGRPYEGIAVFDGKKITVTGTLWNGNKIIDERLITPDGSMLFRVTINP

SEQ ID NO: 1047 - DNA, 477 bp, Artificial Sequence
  Synthetic
atggtcttcacactcgaagatttcgttggggactgggaacagacagccgcctacaacctggaccaagtccttgaacagggaggtgtgtccagtttgacccagaatctcgccgtgtccgtaactccgatccaaaggattgtcctgagcggtgaaaatgccctgaagatcgacatccatgtcatcatcccgtatgaaggtctgagcgccgaccaaatggcccagatcgaaaaaatttttaaggtggtgtaccctgtggatgatcatcactttaaggtgatcctgcactatggcacactggtaatcgacggggttacgccgaacatgatcaactatttcggacggccgtatgaaggcatcgccgtgttcgacggcaaaaagatcactgtaacagggaccctgtggaacggcaacaaaattatcgacgagcgcctgatcacccccgacggctccatgctgttccgagtaaccatcaacccc

SEQ ID NO: 1048 - protein, 159 aa, Artificial Sequence
  Synthetic
MVFTLEDFVGDWEQTAAYNLDQVLEQGGVSSLTQNLAVSVTPIQRIVLSGENALKIDIHVIIPYEGLSADQMAQIEKIFKVVYPVDDHHFKVILHYGTLVIDGVTPNMINYFGRPYEGIAVFDGKKITVTGTLWNGNKIIDERLITPDGSMLFRVTINP

SEQ ID NO: 1049 - DNA, 477 bp, Artificial Sequence
  Synthetic
atggtcttcacactcgaagatttcgttggggactgggaacagacagccgcctacaacctggaccaagtccttgaacagggaggtgtgtccagtttggtgcagaatctcgccgtgtccgtaactccgatccaaaggattgtcctgagcggtgaaaatgccctgaagatcgacatccatgtcatcatcccgtatgaaggtctgagcgccgaccaaatggcccagatcgaaaaaatttttaaggtggtgtaccctgtggatgatcatcactttaaggtgatcctgcactatggcacactggtaatcgacggggttacgccgaacatgatcaactatttcggacggccgtatgaaggcatcgccgtgttcgacggcaaaaagatcactgtaacagggaccctgtggaacggcaacaaaattatcgacgagcgcctgatcacccccgacggctccatgctgttccgagtaaccatcaacccc

SEQ ID NO: 1050 - protein, 159 aa, Artificial Sequence
  Synthetic
MVFTLEDFVGDWEQTAAYNLDQVLEQGGVSSLVQNLAVSVTPIQRIVLSGENALKIDIHVIIPYEGLSADQMAQIEKIFKVVYPVDDHHFKVILHYGTLVIDGVTPNMINYFGRPYEGIAVFDGKKITVTGTLWNGNKIIDERLITPDGSMLFRVTINP

SEQ ID NO: 1051 - DNA, 477 bp, Artificial Sequence
  Synthetic
atggtcttcacactcgaagatttcgttggggactgggaacagacagccgcctacaacctggaccaagtccttgaacagggaggtgtgtccagtttgtggcagaatctcgccgtgtccgtaactccgatccaaaggattgtcctgagcggtgaaaatgccctgaagatcgacatccatgtcatcatcccgtatgaaggtctgagcgccgaccaaatggcccagatcgaaaaaatttttaaggtggtgtaccctgtggatgatcatcactttaaggtgatcctgcactatggcacactggtaatcgacggggttacgccgaacatgatcaactatttcggacggccgtatgaaggcatcgccgtgttcgacggcaaaaagatcactgtaacagggaccctgtggaacggcaacaaaattatcgacgagcgcctgatcacccccgacggctccatgctgttccgagtaaccatcaacccc

SEQ ID NO: 1052 - protein, 159 aa, Artificial Sequence
  Synthetic
MVFTLEDFVGDWEQTAAYNLDQVLEQGGVSSLWQNLAVSVTPIQRIVLSGENALKIDIHVIIPYEGLSADQMAQIEKIFKVVYPVDDHHFKVILHYGTLVIDGVTPNMINYFGRPYEGIAVFDGKKITVTGTLWNGNKIIDERLITPDGSMLFRVTINP

SEQ ID NO: 1053 - DNA, 477 bp, Artificial Sequence
  Synthetic
atggtcttcacactcgaagatttcgttggggactgggaacagacagccgcctacaacctggaccaagtccttgaacagggaggtgtgtccagtttgtaccagaatctcgccgtgtccgtaactccgatccaaaggattgtcctgagcggtgaaaatgccctgaagatcgacatccatgtcatcatcccgtatgaaggtctgagcgccgaccaaatggcccagatcgaaaaaatttttaaggtggtgtaccctgtggatgatcatcactttaaggtgatcctgcactatggcacactggtaatcgacggggttacgccgaacatgatcaactatttcggacggccgtatgaaggcatcgccgtgttcgacggcaaaaagatcactgtaacagggaccctgtggaacggcaacaaaattatcgacgagcgcctgatcacccccgacggctccatgctgttccgagtaaccatcaacccc

SEQ ID NO: 1054 - protein, 159 aa, Artificial Sequence
  Synthetic
MVFTLEDFVGDWEQTAAYNLDQVLEQGGVSSLYQNLAVSVTPIQRIVLSGENALKIDIHVIIPYEGLSADQMAQIEKIFKVVYPVDDHHFKVILHYGTLVIDGVTPNMINYFGRPYEGIAVFDGKKITVTGTLWNGNKIIDERLITPDGSMLFRVTINP

SEQ ID NO: 1055 - DNA, 477 bp, Artificial Sequence
  Synthetic
atggtcttcacactcgaagatttcgttggggactgggaacagacagccgcctacaacctggaccaagtccttgaacagggaggtgtgtccagtttgtttcagaatctcgccgtgtccgtaactccgatccaaaggattgtcgccagcggtgaaaatgccctgaagatcgacatccatgtcatcatcccgtatgaaggtctgagcgccgaccaaatggcccagatcgaaaaaatttttaaggtggtgtaccctgtggatgatcatcactttaaggtgatcctgcactatggcacactggtaatcgacggggttacgccgaacatgatcaactatttcggacggccgtatgaaggcatcgccgtgttcgacggcaaaaagatcactgtaacagggaccctgtggaacggcaacaaaattatcgacgagcgcctgatcacccccgacggctccatgctgttccgagtaaccatcaacccc

SEQ ID NO: 1056 - protein, 159 aa, Artificial Sequence
  Synthetic
MVFTLEDFVGDWEQTAAYNLDQVLEQGGVSSLFQNLAVSVTPIQRIVASGENALKIDIHVIIPYEGLSADQMAQIEKIFKVVYPVDDHHFKVILHYGTLVIDGVTPNMINYFGRPYEGIAVFDGKKITVTGTLWNGNKIIDERLITPDGSMLFRVTINP

SEQ ID NO: 1057 - DNA, 477 bp, Artificial Sequence
  Synthetic
atggtcttcacactcgaagatttcgttggggactgggaacagacagccgcctacaacctggaccaagtccttgaacagggaggtgtgtccagtttgtttcagaatctcgccgtgtccgtaactccgatccaaaggattgtctgcagcggtgaaaatgccctgaagatcgacatccatgtcatcatcccgtatgaaggtctgagcgccgaccaaatggcccagatcgaaaaaatttttaaggtggtgtaccctgtggatgatcatcactttaaggtgatcctgcactatggcacactggtaatcgacggggttacgccgaacatgatcaactatttcggacggccgtatgaaggcatcgccgtgttcgacggcaaaaagatcactgtaacagggaccctgtggaacggcaacaaaattatcgacgagcgcctgatcacccccgacggctccatgctgttccgagtaaccatcaacccc

SEQ ID NO: 1058 - protein, 159 aa, Artificial Sequence
  Synthetic
MVFTLEDFVGDWEQTAAYNLDQVLEQGGVSSLFQNLAVSVTPIQRIVCSGENALKIDIHVIIPYEGLSADQMAQIEKIFKVVYPVDDHHFKVILHYGTLVIDGVTPNMINYFGRPYEGIAVFDGKKITVTGTLWNGNKIIDERLITPDGSMLFRVTINP

SEQ ID NO: 1059 - DNA, 477 bp, Artificial Sequence
  Synthetic
atggtcttcacactcgaagatttcgttggggactgggaacagacagccgcctacaacctggaccaagtccttgaacagggaggtgtgtccagtttgtttcagaatctcgccgtgtccgtaactccgatccaaaggattgtcgacagcggtgaaaatgccctgaagatcgacatccatgtcatcatcccgtatgaaggtctgagcgccgaccaaatggcccagatcgaaaaaatttttaaggtggtgtaccctgtggatgatcatcactttaaggtgatcctgcactatggcacactggtaatcgacggggttacgccgaacatgatcaactatttcggacggccgtatgaaggcatcgccgtgttcgacggcaaaaagatcactgtaacagggaccctgtggaacggcaacaaaattatcgacgagcgcctgatcacccccgacggctccatgctgttccgagtaaccatcaacccc

SEQ ID NO: 1060 - protein, 159 aa, Artificial Sequence
  Synthetic
MVFTLEDFVGDWEQTAAYNLDQVLEQGGVSSLFQNLAVSVTPIQRIVDSGENALKIDIHVIIPYEGLSADQMAQIEKIFKVVYPVDDHHFKVILHYGTLVIDGVTPNMINYFGRPYEGIAVFDGKKITVTGTLWNGNKIIDERLITPDGSMLFRVTINP

SEQ ID NO: 1061 - DNA, 477 bp, Artificial Sequence
  Synthetic
atggtcttcacactcgaagatttcgttggggactgggaacagacagccgcctacaacctggaccaagtccttgaacagggaggtgtgtccagtttgtttcagaatctcgccgtgtccgtaactccgatccaaaggattgtcgagagcggtgaaaatgccctgaagatcgacatccatgtcatcatcccgtatgaaggtctgagcgccgaccaaatggcccagatcgaaaaaatttttaaggtggtgtaccctgtggatgatcatcactttaaggtgatcctgcactatggcacactggtaatcgacggggttacgccgaacatgatcaactatttcggacggccgtatgaaggcatcgccgtgttcgacggcaaaaagatcactgtaacagggaccctgtggaacggcaacaaaattatcgacgagcgcctgatcacccccgacggctccatgctgttccgagtaaccatcaacccc

SEQ ID NO: 1062 - protein, 159 aa, Artificial Sequence
  Synthetic
MVFTLEDFVGDWEQTAAYNLDQVLEQGGVSSLFQNLAVSVTPIQRIVESGENALKIDIHVIIPYEGLSADQMAQIEKIFKVVYPVDDHHFKVILHYGTLVIDGVTPNMINYFGRPYEGIAVFDGKKITVTGTLWNGNKIIDERLITPDGSMLFRVTINP

SEQ ID NO: 1063 - DNA, 477 bp, Artificial Sequence
  Synthetic
atggtcttcacactcgaagatttcgttggggactgggaacagacagccgcctacaacctggaccaagtccttgaacagggaggtgtgtccagtttgtttcagaatctcgccgtgtccgtaactccgatccaaaggattgtcttcagcggtgaaaatgccctgaagatcgacatccatgtcatcatcccgtatgaaggtctgagcgccgaccaaatggcccagatcgaaaaaatttttaaggtggtgtaccctgtggatgatcatcactttaaggtgatcctgcactatggcacactggtaatcgacggggttacgccgaacatgatcaactatttcggacggccgtatgaaggcatcgccgtgttcgacggcaaaaagatcactgtaacagggaccctgtggaacggcaacaaaattatcgacgagcgcctgatcacccccgacggctccatgctgttccgagtaaccatcaacccc

SEQ ID NO: 1064 - protein, 159 aa, Artificial Sequence
  Synthetic
MVFTLEDFVGDWEQTAAYNLDQVLEQGGVSSLFQNLAVSVTPIQRIVFSGENALKIDIHVIIPYEGLSADQMAQIEKIFKVVYPVDDHHFKVILHYGTLVIDGVTPNMINYFGRPYEGIAVFDGKKITVTGTLWNGNKIIDERLITPDGSMLFRVTINP

SEQ ID NO: 1065 - DNA, 477 bp, Artificial Sequence
  Synthetic
atggtcttcacactcgaagatttcgttggggactgggaacagacagccgcctacaacctggaccaagtccttgaacagggaggtgtgtccagtttgtttcagaatctcgccgtgtccgtaactccgatccaaaggattgtcggcagcggtgaaaatgccctgaagatcgacatccatgtcatcatcccgtatgaaggtctgagcgccgaccaaatggcccagatcgaaaaaatttttaaggtggtgtaccctgtggatgatcatcactttaaggtgatcctgcactatggcacactggtaatcgacggggttacgccgaacatgatcaactatttcggacggccgtatgaaggcatcgccgtgttcgacggcaaaaagatcactgtaacagggaccctgtggaacggcaacaaaattatcgacgagcgcctgatcacccccgacggctccatgctgttccgagtaaccatcaacccc

SEQ ID NO: 1066 - protein, 159 aa, Artificial Sequence
  Synthetic
MVFTLEDFVGDWEQTAAYNLDQVLEQGGVSSLFQNLAVSVTPIQRIVGSGENALKIDIHVIIPYEGLSADQMAQIEKIFKVVYPVDDHHFKVILHYGTLVIDGVTPNMINYFGRPYEGIAVFDGKKITVTGTLWNGNKIIDERLITPDGSMLFRVTINP

SEQ ID NO: 1067 - DNA, 477 bp, Artificial Sequence
  Synthetic
atggtcttcacactcgaagatttcgttggggactgggaacagacagccgcctacaacctggaccaagtccttgaacagggaggtgtgtccagtttgtttcagaatctcgccgtgtccgtaactccgatccaaaggattgtccacagcggtgaaaatgccctgaagatcgacatccatgtcatcatcccgtatgaaggtctgagcgccgaccaaatggcccagatcgaaaaaatttttaaggtggtgtaccctgtggatgatcatcactttaaggtgatcctgcactatggcacactggtaatcgacggggttacgccgaacatgatcaactatttcggacggccgtatgaaggcatcgccgtgttcgacggcaaaaagatcactgtaacagggaccctgtggaacggcaacaaaattatcgacgagcgcctgatcacccccgacggctccatgctgttccgagtaaccatcaacccc

SEQ ID NO: 1068 - protein, 159 aa, Artificial Sequence
  Synthetic
MVFTLEDFVGDWEQTAAYNLDQVLEQGGVSSLFQNLAVSVTPIQRIVHSGENALKIDIHVIIPYEGLSADQMAQIEKIFKVVYPVDDHHFKVILHYGTLVIDGVTPNMINYFGRPYEGIAVFDGKKITVTGTLWNGNKIIDERLITPDGSMLFRVTINP

SEQ ID NO: 1069 - DNA, 477 bp, Artificial Sequence
  Synthetic
atggtcttcacactcgaagatttcgttggggactgggaacagacagccgcctacaacctggaccaagtccttgaacagggaggtgtgtccagtttgtttcagaatctcgccgtgtccgtaactccgatccaaaggattgtcatcagcggtgaaaatgccctgaagatcgacatccatgtcatcatcccgtatgaaggtctgagcgccgaccaaatggcccagatcgaaaaaatttttaaggtggtgtaccctgtggatgatcatcactttaaggtgatcctgcactatggcacactggtaatcgacggggttacgccgaacatgatcaactatttcggacggccgtatgaaggcatcgccgtgttcgacggcaaaaagatcactgtaacagggaccctgtggaacggcaacaaaattatcgacgagcgcctgatcacccccgacggctccatgctgttccgagtaaccatcaacccc

SEQ ID NO: 1070 - protein, 159 aa, Artificial Sequence
  Synthetic
MVFTLEDFVGDWEQTAAYNLDQVLEQGGVSSLFQNLAVSVTPIQRIVISGENALKIDIHVIIPYEGLSADQMAQIEKIFKVVYPVDDHHFKVILHYGTLVIDGVTPNMINYFGRPYEGIAVFDGKKITVTGTLWNGNKIIDERLITPDGSMLFRVTINP

SEQ ID NO: 1071 - DNA, 477 bp, Artificial Sequence
  Synthetic
atggtcttcacactcgaagatttcgttggggactgggaacagacagccgcctacaacctggaccaagtccttgaacagggaggtgtgtccagtttgtttcagaatctcgccgtgtccgtaactccgatccaaaggattgtcaagagcggtgaaaatgccctgaagatcgacatccatgtcatcatcccgtatgaaggtctgagcgccgaccaaatggcccagatcgaaaaaatttttaaggtggtgtaccctgtggatgatcatcactttaaggtgatcctgcactatggcacactggtaatcgacggggttacgccgaacatgatcaactatttcggacggccgtatgaaggcatcgccgtgttcgacggcaaaaagatcactgtaacagggaccctgtggaacggcaacaaaattatcgacgagcgcctgatcacccccgacggctccatgctgttccgagtaaccatcaacccc

SEQ ID NO: 1072 - protein, 159 aa, Artificial Sequence
  Synthetic
MVFTLEDFVGDWEQTAAYNLDQVLEQGGVSSLFQNLAVSVTPIQRIVKSGENALKIDIHVIIPYEGLSADQMAQIEKIFKVVYPVDDHHFKVILHYGTLVIDGVTPNMINYFGRPYEGIAVFDGKKITVTGTLWNGNKIIDERLITPDGSMLFRVTINP

SEQ ID NO: 1073 - DNA, 477 bp, Artificial Sequence
  Synthetic
atggtcttcacactcgaagatttcgttggggactgggaacagacagccgcctacaacctggaccaagtccttgaacagggaggtgtgtccagtttgtttcagaatctcgccgtgtccgtaactccgatccaaaggattgtcatgagcggtgaaaatgccctgaagatcgacatccatgtcatcatcccgtatgaaggtctgagcgccgaccaaatggcccagatcgaaaaaatttttaaggtggtgtaccctgtggatgatcatcactttaaggtgatcctgcactatggcacactggtaatcgacggggttacgccgaacatgatcaactatttcggacggccgtatgaaggcatcgccgtgttcgacggcaaaaagatcactgtaacagggaccctgtggaacggcaacaaaattatcgacgagcgcctgatcacccccgacggctccatgctgttccgagtaaccatcaacccc

SEQ ID NO: 1074 - protein, 159 aa, Artificial Sequence
  Synthetic
MVFTLEDFVGDWEQTAAYNLDQVLEQGGVSSLFQNLAVSVTPIQRIVMSGENALKIDIHVIIPYEGLSADQMAQIEKIFKVVYPVDDHHFKVILHYGTLVIDGVTPNMINYFGRPYEGIAVFDGKKITVTGTLWNGNKIIDERLITPDGSMLFRVTINP

SEQ ID NO: 1075 - DNA, 477 bp, Artificial Sequence
  Synthetic
atggtcttcacactcgaagatttcgttggggactgggaacagacagccgcctacaacctggaccaagtccttgaacagggaggtgtgtccagtttgtttcagaatctcgccgtgtccgtaactccgatccaaaggattgtcaacagcggtgaaaatgccctgaagatcgacatccatgtcatcatcccgtatgaaggtctgagcgccgaccaaatggcccagatcgaaaaaatttttaaggtggtgtaccctgtggatgatcatcactttaaggtgatcctgcactatggcacactggtaatcgacggggttacgccgaacatgatcaactatttcggacggccgtatgaaggcatcgccgtgttcgacggcaaaaagatcactgtaacagggaccctgtggaacggcaacaaaattatcgacgagcgcctgatcacccccgacggctccatgctgttccgagtaaccatcaacccc

SEQ ID NO: 1076 - protein, 159 aa, Artificial Sequence
  Synthetic
MVFTLEDFVGDWEQTAAYNLDQVLEQGGVSSLFQNLAVSVTPIQRIVNSGENALKIDIHVIIPYEGLSADQMAQIEKIFKVVYPVDDHHFKVILHYGTLVIDGVTPNMINYFGRPYEGIAVFDGKKITVTGTLWNGNKIIDERLITPDGSMLFRVTINP

SEQ ID NO: 1077 - DNA, 477 bp, Artificial Sequence
  Synthetic
atggtcttcacactcgaagatttcgttggggactgggaacagacagccgcctacaacctggaccaagtccttgaacagggaggtgtgtccagtttgtttcagaatctcgccgtgtccgtaactccgatccaaaggattgtccccagcggtgaaaatgccctgaagatcgacatccatgtcatcatcccgtatgaaggtctgagcgccgaccaaatggcccagatcgaaaaaatttttaaggtggtgtaccctgtggatgatcatcactttaaggtgatcctgcactatggcacactggtaatcgacggggttacgccgaacatgatcaactatttcggacggccgtatgaaggcatcgccgtgttcgacggcaaaaagatcactgtaacagggaccctgtggaacggcaacaaaattatcgacgagcgcctgatcacccccgacggctccatgctgttccgagtaaccatcaacccc

SEQ ID NO: 1078 - protein, 159 aa, Artificial Sequence
  Synthetic
MVFTLEDFVGDWEQTAAYNLDQVLEQGGVSSLFQNLAVSVTPIQRIVPSGENALKIDIHVIIPYEGLSADQMAQIEKIFKVVYPVDDHHFKVILHYGTLVIDGVTPNMINYFGRPYEGIAVFDGKKITVTGTLWNGNKIIDERLITPDGSMLFRVTINP

SEQ ID NO: 1079 - DNA, 477 bp, Artificial Sequence
  Synthetic
atggtcttcacactcgaagatttcgttggggactgggaacagacagccgcctacaacctggaccaagtccttgaacagggaggtgtgtccagtttgtttcagaatctcgccgtgtccgtaactccgatccaaaggattgtccagagcggtgaaaatgccctgaagatcgacatccatgtcatcatcccgtatgaaggtctgagcgccgaccaaatggcccagatcgaaaaaatttttaaggtggtgtaccctgtggatgatcatcactttaaggtgatcctgcactatggcacactggtaatcgacggggttacgccgaacatgatcaactatttcggacggccgtatgaaggcatcgccgtgttcgacggcaaaaagatcactgtaacagggaccctgtggaacggcaacaaaattatcgacgagcgcctgatcacccccgacggctccatgctgttccgagtaaccatcaacccc

SEQ ID NO: 1080 - protein, 159 aa, Artificial Sequence
  Synthetic
MVFTLEDFVGDWEQTAAYNLDQVLEQGGVSSLFQNLAVSVTPIQRIVQSGENALKIDIHVIIPYEGLSADQMAQIEKIFKVVYPVDDHHFKVILHYGTLVIDGVTPNMINYFGRPYEGIAVFDGKKITVTGTLWNGNKIIDERLITPDGSMLFRVTINP

SEQ ID NO: 1081 - DNA, 477 bp, Artificial Sequence
  Synthetic
atggtcttcacactcgaagatttcgttggggactgggaacagacagccgcctacaacctggaccaagtccttgaacagggaggtgtgtccagtttgtttcagaatctcgccgtgtccgtaactccgatccaaaggattgtccggagcggtgaaaatgccctgaagatcgacatccatgtcatcatcccgtatgaaggtctgagcgccgaccaaatggcccagatcgaaaaaatttttaaggtggtgtaccctgtggatgatcatcactttaaggtgatcctgcactatggcacactggtaatcgacggggttacgccgaacatgatcaactatttcggacggccgtatgaaggcatcgccgtgttcgacggcaaaaagatcactgtaacagggaccctgtggaacggcaacaaaattatcgacgagcgcctgatcacccccgacggctccatgctgttccgagtaaccatcaacccc

SEQ ID NO: 1082 - protein, 159 aa, Artificial Sequence
  Synthetic
MVFTLEDFVGDWEQTAAYNLDQVLEQGGVSSLFQNLAVSVTPIQRIVRSGENALKIDIHVIIPYEGLSADQMAQIEKIFKVVYPVDDHHFKVILHYGTLVIDGVTPNMINYFGRPYEGIAVFDGKKITVTGTLWNGNKIIDERLITPDGSMLFRVTINP

SEQ ID NO: 1083 - DNA, 477 bp, Artificial Sequence
  Synthetic
atggtcttcacactcgaagatttcgttggggactgggaacagacagccgcctacaacctggaccaagtccttgaacagggaggtgtgtccagtttgtttcagaatctcgccgtgtccgtaactccgatccaaaggattgtcagcagcggtgaaaatgccctgaagatcgacatccatgtcatcatcccgtatgaaggtctgagcgccgaccaaatggcccagatcgaaaaaatttttaaggtggtgtaccctgtggatgatcatcactttaaggtgatcctgcactatggcacactggtaatcgacggggttacgccgaacatgatcaactatttcggacggccgtatgaaggcatcgccgtgttcgacggcaaaaagatcactgtaacagggaccctgtggaacggcaacaaaattatcgacgagcgcctgatcacccccgacggctccatgctgttccgagtaaccatcaacccc

SEQ ID NO: 1084 - protein, 159 aa, Artificial Sequence
  Synthetic
MVFTLEDFVGDWEQTAAYNLDQVLEQGGVSSLFQNLAVSVTPIQRIVSSGENALKIDIHVIIPYEGLSADQMAQIEKIFKVVYPVDDHHFKVILHYGTLVIDGVTPNMINYFGRPYEGIAVFDGKKITVTGTLWNGNKIIDERLITPDGSMLFRVTINP

SEQ ID NO: 1085 - DNA, 477 bp, Artificial Sequence
  Synthetic
atggtcttcacactcgaagatttcgttggggactgggaacagacagccgcctacaacctggaccaagtccttgaacagggaggtgtgtccagtttgtttcagaatctcgccgtgtccgtaactccgatccaaaggattgtcaccagcggtgaaaatgccctgaagatcgacatccatgtcatcatcccgtatgaaggtctgagcgccgaccaaatggcccagatcgaaaaaatttttaaggtggtgtaccctgtggatgatcatcactttaaggtgatcctgcactatggcacactggtaatcgacggggttacgccgaacatgatcaactatttcggacggccgtatgaaggcatcgccgtgttcgacggcaaaaagatcactgtaacagggaccctgtggaacggcaacaaaattatcgacgagcgcctgatcacccccgacggctccatgctgttccgagtaaccatcaacccc

SEQ ID NO: 1086 - protein, 159 aa, Artificial Sequence
  Synthetic
MVFTLEDFVGDWEQTAAYNLDQVLEQGGVSSLFQNLAVSVTPIQRIVTSGENALKIDIHVIIPYEGLSADQMAQIEKIFKVVYPVDDHHFKVILHYGTLVIDGVTPNMINYFGRPYEGIAVFDGKKITVTGTLWNGNKIIDERLITPDGSMLFRVTINP

SEQ ID NO: 1087 - DNA, 477 bp, Artificial Sequence
  Synthetic
atggtcttcacactcgaagatttcgttggggactgggaacagacagccgcctacaacctggaccaagtccttgaacagggaggtgtgtccagtttgtttcagaatctcgccgtgtccgtaactccgatccaaaggattgtcgtgagcggtgaaaatgccctgaagatcgacatccatgtcatcatcccgtatgaaggtctgagcgccgaccaaatggcccagatcgaaaaaatttttaaggtggtgtaccctgtggatgatcatcactttaaggtgatcctgcactatggcacactggtaatcgacggggttacgccgaacatgatcaactatttcggacggccgtatgaaggcatcgccgtgttcgacggcaaaaagatcactgtaacagggaccctgtggaacggcaacaaaattatcgacgagcgcctgatcacccccgacggctccatgctgttccgagtaaccatcaacccc

SEQ ID NO: 1088 - protein, 159 aa, Artificial Sequence
  Synthetic
MVFTLEDFVGDWEQTAAYNLDQVLEQGGVSSLFQNLAVSVTPIQRIVVSGENALKIDIHVIIPYEGLSADQMAQIEKIFKVVYPVDDHHFKVILHYGTLVIDGVTPNMINYFGRPYEGIAVFDGKKITVTGTLWNGNKIIDERLITPDGSMLFRVTINP

SEQ ID NO: 1089 - DNA, 477 bp, Artificial Sequence
  Synthetic
atggtcttcacactcgaagatttcgttggggactgggaacagacagccgcctacaacctggaccaagtccttgaacagggaggtgtgtccagtttgtttcagaatctcgccgtgtccgtaactccgatccaaaggattgtctggagcggtgaaaatgccctgaagatcgacatccatgtcatcatcccgtatgaaggtctgagcgccgaccaaatggcccagatcgaaaaaatttttaaggtggtgtaccctgtggatgatcatcactttaaggtgatcctgcactatggcacactggtaatcgacggggttacgccgaacatgatcaactatttcggacggccgtatgaaggcatcgccgtgttcgacggcaaaaagatcactgtaacagggaccctgtggaacggcaacaaaattatcgacgagcgcctgatcacccccgacggctccatgctgttccgagtaaccatcaacccc

SEQ ID NO: 1090 - protein, 159 aa, Artificial Sequence
  Synthetic
MVFTLEDFVGDWEQTAAYNLDQVLEQGGVSSLFQNLAVSVTPIQRIVWSGENALKIDIHVIIPYEGLSADQMAQIEKIFKVVYPVDDHHFKVILHYGTLVIDGVTPNMINYFGRPYEGIAVFDGKKITVTGTLWNGNKIIDERLITPDGSMLFRVTINP

SEQ ID NO: 1091 - DNA, 477 bp, Artificial Sequence
  Synthetic
atggtcttcacactcgaagatttcgttggggactgggaacagacagccgcctacaacctggaccaagtccttgaacagggaggtgtgtccagtttgtttcagaatctcgccgtgtccgtaactccgatccaaaggattgtctacagcggtgaaaatgccctgaagatcgacatccatgtcatcatcccgtatgaaggtctgagcgccgaccaaatggcccagatcgaaaaaatttttaaggtggtgtaccctgtggatgatcatcactttaaggtgatcctgcactatggcacactggtaatcgacggggttacgccgaacatgatcaactatttcggacggccgtatgaaggcatcgccgtgttcgacggcaaaaagatcactgtaacagggaccctgtggaacggcaacaaaattatcgacgagcgcctgatcacccccgacggctccatgctgttccgagtaaccatcaacccc

SEQ ID NO: 1092 - protein, 159 aa, Artificial Sequence
  Synthetic
MVFTLEDFVGDWEQTAAYNLDQVLEQGGVSSLFQNLAVSVTPIQRIVYSGENALKIDIHVIIPYEGLSADQMAQIEKIFKVVYPVDDHHFKVILHYGTLVIDGVTPNMINYFGRPYEGIAVFDGKKITVTGTLWNGNKIIDERLITPDGSMLFRVTINP

SEQ ID NO: 1093 - DNA, 477 bp, Artificial Sequence
  Synthetic
atggtcttcacactcgaagatttcgttggggactgggaacagacagccgcctacaacctggaccaagtccttgaacagggaggtgtgtccagtttgtttcagaatctcgccgtgtccgtaactccgatccaaaggattgtcctgagcggtgaaaatgccctgaagatcgacatccatgtcatcatcccgtatgaaggtctgagcgccgaccaaatggcccagatcgaaaaaatttttaaggtggtgtaccctgtggatgatcatcactttaaggtgatcctgcactatggcacactggtaatcgacggggttacgccgaacatgatcgcctatttcggacggccgtatgaaggcatcgccgtgttcgacggcaaaaagatcactgtaacagggaccctgtggaacggcaacaaaattatcgacgagcgcctgatcacccccgacggctccatgctgttccgagtaaccatcaacccc

SEQ ID NO: 1094 - protein, 159 aa, Artificial Sequence
  Synthetic
MVFTLEDFVGDWEQTAAYNLDQVLEQGGVSSLFQNLAVSVTPIQRIVLSGENALKIDIHVIIPYEGLSADQMAQIEKIFKVVYPVDDHHFKVILHYGTLVIDGVTPNMIAYFGRPYEGIAVFDGKKITVTGTLWNGNKIIDERLITPDGSMLFRVTINP

SEQ ID NO: 1095 - DNA, 477 bp, Artificial Sequence
  Synthetic
atggtcttcacactcgaagatttcgttggggactgggaacagacagccgcctacaacctggaccaagtccttgaacagggaggtgtgtccagtttgtttcagaatctcgccgtgtccgtaactccgatccaaaggattgtcctgagcggtgaaaatgccctgaagatcgacatccatgtcatcatcccgtatgaaggtctgagcgccgaccaaatggcccagatcgaaaaaatttttaaggtggtgtaccctgtggatgatcatcactttaaggtgatcctgcactatggcacactggtaatcgacggggttacgccgaacatgatctgctatttcggacggccgtatgaaggcatcgccgtgttcgacggcaaaaagatcactgtaacagggaccctgtggaacggcaacaaaattatcgacgagcgcctgatcacccccgacggctccatgctgttccgagtaaccatcaacccc

SEQ ID NO: 1096 - protein, 159 aa, Artificial Sequence
  Synthetic
MVFTLEDFVGDWEQTAAYNLDQVLEQGGVSSLFQNLAVSVTPIQRIVLSGENALKIDIHVIIPYEGLSADQMAQIEKIFKVVYPVDDHHFKVILHYGTLVIDGVTPNMICYFGRPYEGIAVFDGKKITVTGTLWNGNKIIDERLITPDGSMLFRVTINP

SEQ ID NO: 1097 - DNA, 477 bp, Artificial Sequence; identical to SEQ ID NO: 925
  Synthetic

SEQ ID NO: 1098 - protein, 159 aa, Artificial Sequence; identical to SEQ ID NO: 926
  Synthetic

SEQ ID NO: 1099 - DNA, 477 bp, Artificial Sequence
  Synthetic
atggtcttcacactcgaagatttcgttggggactgggaacagacagccgcctacaacctggaccaagtccttgaacagggaggtgtgtccagtttgtttcagaatctcgccgtgtccgtaactccgatccaaaggattgtcctgagcggtgaaaatgccctgaagatcgacatccatgtcatcatcccgtatgaaggtctgagcgccgaccaaatggcccagatcgaaaaaatttttaaggtggtgtaccctgtggatgatcatcactttaaggtgatcctgcactatggcacactggtaatcgacggggttacgccgaacatgatcgagtatttcggacggccgtatgaaggcatcgccgtgttcgacggcaaaaagatcactgtaacagggaccctgtggaacggcaacaaaattatcgacgagcgcctgatcacccccgacggctccatgctgttccgagtaaccatcaacccc

SEQ ID NO: 1100 - protein, 159 aa, Artificial Sequence
  Synthetic
MVFTLEDFVGDWEQTAAYNLDQVLEQGGVSSLFQNLAVSVTPIQRIVLSGENALKIDIHVIIPYEGLSADQMAQIEKIFKVVYPVDDHHFKVILHYGTLVIDGVTPNMIEYFGRPYEGIAVFDGKKITVTGTLWNGNKIIDERLITPDGSMLFRVTINP

SEQ ID NO: 1101 - DNA, 477 bp, Artificial Sequence
  Synthetic
atggtcttcacactcgaagatttcgttggggactgggaacagacagccgcctacaacctggaccaagtccttgaacagggaggtgtgtccagtttgtttcagaatctcgccgtgtccgtaactccgatccaaaggattgtcctgagcggtgaaaatgccctgaagatcgacatccatgtcatcatcccgtatgaaggtctgagcgccgaccaaatggcccagatcgaaaaaatttttaaggtggtgtaccctgtggatgatcatcactttaaggtgatcctgcactatggcacactggtaatcgacggggttacgccgaacatgatcttctatttcggacggccgtatgaaggcatcgccgtgttcgacggcaaaaagatcactgtaacagggaccctgtggaacggcaacaaaattatcgacgagcgcctgatcacccccgacggctccatgctgttccgagtaaccatcaacccc

SEQ ID NO: 1102 - protein, 159 aa, Artificial Sequence
  Synthetic
MVFTLEDFVGDWEQTAAYNLDQVLEQGGVSSLFQNLAVSVTPIQRIVLSGENALKIDIHVIIPYEGLSADQMAQIEKIFKVVYPVDDHHFKVILHYGTLVIDGVTPNMIFYFGRPYEGIAVFDGKKITVTGTLWNGNKIIDERLITPDGSMLFRVTINP

SEQ ID NO: 1103 - DNA, 477 bp, Artificial Sequence
  Synthetic
atggtcttcacactcgaagatttcgttggggactgggaacagacagccgcctacaacctggaccaagtccttgaacagggaggtgtgtccagtttgtttcagaatctcgccgtgtccgtaactccgatccaaaggattgtcctgagcggtgaaaatgccctgaagatcgacatccatgtcatcatcccgtatgaaggtctgagcgccgaccaaatggcccagatcgaaaaaatttttaaggtggtgtaccctgtggatgatcatcactttaaggtgatcctgcactatggcacactggtaatcgacggggttacgccgaacatgatcggctatttcggacggccgtatgaaggcatcgccgtgttcgacggcaaaaagatcactgtaacagggaccctgtggaacggcaacaaaattatcgacgagcgcctgatcacccccgacggctccatgctgttccgagtaaccatcaacccc

SEQ ID NO: 1104 - protein, 159 aa, Artificial Sequence
  Synthetic
MVFTLEDFVGDWEQTAAYNLDQVLEQGGVSSLFQNLAVSVTPIQRIVLSGENALKIDIHVIIPYEGLSADQMAQIEKIFKVVYPVDDHHFKVILHYGTLVIDGVTPNMIGYFGRPYEGIAVFDGKKITVTGTLWNGNKIIDERLITPDGSMLFRVTINP

SEQ ID NO: 1105 - DNA, 477 bp, Artificial Sequence
  Synthetic
atggtcttcacactcgaagatttcgttggggactgggaacagacagccgcctacaacctggaccaagtccttgaacagggaggtgtgtccagtttgtttcagaatctcgccgtgtccgtaactccgatccaaaggattgtcctgagcggtgaaaatgccctgaagatcgacatccatgtcatcatcccgtatgaaggtctgagcgccgaccaaatggcccagatcgaaaaaatttttaaggtggtgtaccctgtggatgatcatcactttaaggtgatcctgcactatggcacactggtaatcgacggggttacgccgaacatgatccactatttcggacggccgtatgaaggcatcgccgtgttcgacggcaaaaagatcactgtaacagggaccctgtggaacggcaacaaaattatcgacgagcgcctgatcacccccgacggctccatgctgttccgagtaaccatcaacccc

SEQ ID NO: 1106 - protein, 159 aa, Artificial Sequence
  Synthetic
MVFTLEDFVGDWEQTAAYNLDQVLEQGGVSSLFQNLAVSVTPIQRIVLSGENALKIDIHVIIPYEGLSADQMAQIEKIFKVVYPVDDHHFKVILHYGTLVIDGVTPNMIHYFGRPYEGIAVFDGKKITVTGTLWNGNKIIDERLITPDGSMLFRVTINP

SEQ ID NO: 1107 - DNA, 477 bp, Artificial Sequence
  Synthetic
atggtcttcacactcgaagatttcgttggggactgggaacagacagccgcctacaacctggaccaagtccttgaacagggaggtgtgtccagtttgtttcagaatctcgccgtgtccgtaactccgatccaaaggattgtcctgagcggtgaaaatgccctgaagatcgacatccatgtcatcatcccgtatgaaggtctgagcgccgaccaaatggcccagatcgaaaaaatttttaaggtggtgtaccctgtggatgatcatcactttaaggtgatcctgcactatggcacactggtaatcgacggggttacgccgaacatgatcatctatttcggacggccgtatgaaggcatcgccgtgttcgacggcaaaaagatcactgtaacagggaccctgtggaacggcaacaaaattatcgacgagcgcctgatcacccccgacggctccatgctgttccgagtaaccatcaacccc

SEQ ID NO: 1108 - protein, 159 aa, Artificial Sequence
  Synthetic
MVFTLEDFVGDWEQTAAYNLDQVLEQGGVSSLFQNLAVSVTPIQRIVLSGENALKIDIHVIIPYEGLSADQMAQIEKIFKVVYPVDDHHFKVILHYGTLVIDGVTPNMIIYFGRPYEGIAVFDGKKITVTGTLWNGNKIIDERLITPDGSMLFRVTINP

SEQ ID NO: 1109 - DNA, 477 bp, Artificial Sequence
  Synthetic
atggtcttcacactcgaagatttcgttggggactgggaacagacagccgcctacaacctggaccaagtccttgaacagggaggtgtgtccagtttgtttcagaatctcgccgtgtccgtaactccgatccaaaggattgtcctgagcggtgaaaatgccctgaagatcgacatccatgtcatcatcccgtatgaaggtctgagcgccgaccaaatggcccagatcgaaaaaatttttaaggtggtgtaccctgtggatgatcatcactttaaggtgatcctgcactatggcacactggtaatcgacggggttacgccgaacatgatcaagtatttcggacggccgtatgaaggcatcgccgtgttcgacggcaaaaagatcactgtaacagggaccctgtggaacggcaacaaaattatcgacgagcgcctgatcacccccgacggctccatgctgttccgagtaaccatcaacccc

SEQ ID NO: 1110 - protein, 159 aa, Artificial Sequence
  Synthetic
MVFTLEDFVGDWEQTAAYNLDQVLEQGGVSSLFQNLAVSVTPIQRIVLSGENALKIDIHVIIPYEGLSADQMAQIEKIFKVVYPVDDHHFKVILHYGTLVIDGVTPNMIKYFGRPYEGIAVFDGKKITVTGTLWNGNKIIDERLITPDGSMLFRVTINP

SEQ ID NO: 1111 - DNA, 477 bp, Artificial Sequence
  Synthetic
atggtcttcacactcgaagatttcgttggggactgggaacagacagccgcctacaacctggaccaagtccttgaacagggaggtgtgtccagtttgtttcagaatctcgccgtgtccgtaactccgatccaaaggattgtcctgagcggtgaaaatgccctgaagatcgacatccatgtcatcatcccgtatgaaggtctgagcgccgaccaaatggcccagatcgaaaaaatttttaaggtggtgtaccctgtggatgatcatcactttaaggtgatcctgcactatggcacactggtaatcgacggggttacgccgaacatgatcctgtatttcggacggccgtatgaaggcatcgccgtgttcgacggcaaaaagatcactgtaacagggaccctgtggaacggcaacaaaattatcgacgagcgcctgatcacccccgacggctccatgctgttccgagtaaccatcaacccc

SEQ ID NO: 1112 - protein, 159 aa, Artificial Sequence
  Synthetic
MVFTLEDFVGDWEQTAAYNLDQVLEQGGVSSLFQNLAVSVTPIQRIVLSGENALKIDIHVIIPYEGLSADQMAQIEKIFKVVYPVDDHHFKVILHYGTLVIDGVTPNMILYFGRPYEGIAVFDGKKITVTGTLWNGNKIIDERLITPDGSMLFRVTINP

SEQ ID NO: 1113 - DNA, 477 bp, Artificial Sequence
  Synthetic
atggtcttcacactcgaagatttcgttggggactgggaacagacagccgcctacaacctggaccaagtccttgaacagggaggtgtgtccagtttgtttcagaatctcgccgtgtccgtaactccgatccaaaggattgtcctgagcggtgaaaatgccctgaagatcgacatccatgtcatcatcccgtatgaaggtctgagcgccgaccaaatggcccagatcgaaaaaatttttaaggtggtgtaccctgtggatgatcatcactttaaggtgatcctgcactatggcacactggtaatcgacggggttacgccgaacatgatcatgtatttcggacggccgtatgaaggcatcgccgtgttcgacggcaaaaagatcactgtaacagggaccctgtggaacggcaacaaaattatcgacgagcgcctgatcacccccgacggctccatgctgttccgagtaaccatcaacccc

SEQ ID NO: 1114 - protein, 159 aa, Artificial Sequence
  Synthetic
MVFTLEDFVGDWEQTAAYNLDQVLEQGGVSSLFQNLAVSVTPIQRIVLSGENALKIDIHVIIPYEGLSADQMAQIEKIFKVVYPVDDHHFKVILHYGTLVIDGVTPNMIMYFGRPYEGIAVFDGKKITVTGTLWNGNKIIDERLITPDGSMLFRVTINP

SEQ ID NO: 1115 - DNA, 477 bp, Artificial Sequence
  Synthetic
atggtcttcacactcgaagatttcgttggggactgggaacagacagccgcctacaacctggaccaagtccttgaacagggaggtgtgtccagtttgtttcagaatctcgccgtgtccgtaactccgatccaaaggattgtcctgagcggtgaaaatgccctgaagatcgacatccatgtcatcatcccgtatgaaggtctgagcgccgaccaaatggcccagatcgaaaaaatttttaaggtggtgtaccctgtggatgatcatcactttaaggtgatcctgcactatggcacactggtaatcgacggggttacgccgaacatgatcccctatttcggacggccgtatgaaggcatcgccgtgttcgacggcaaaaagatcactgtaacagggaccctgtggaacggcaacaaaattatcgacgagcgcctgatcacccccgacggctccatgctgttccgagtaaccatcaacccc

SEQ ID NO: 1116 - protein, 159 aa, Artificial Sequence
  Synthetic
MVFTLEDFVGDWEQTAAYNLDQVLEQGGVSSLFQNLAVSVTPIQRIVLSGENALKIDIHVIIPYEGLSADQMAQIEKIFKVVYPVDDHHFKVILHYGTLVIDGVTPNMIPYFGRPYEGIAVFDGKKITVTGTLWNGNKIIDERLITPDGSMLFRVTINP

SEQ ID NO: 1117 - DNA, 477 bp, Artificial Sequence
  Synthetic
atggtcttcacactcgaagatttcgttggggactgggaacagacagccgcctacaacctggaccaagtccttgaacagggaggtgtgtccagtttgtttcagaatctcgccgtgtccgtaactccgatccaaaggattgtcctgagcggtgaaaatgccctgaagatcgacatccatgtcatcatcccgtatgaaggtctgagcgccgaccaaatggcccagatcgaaaaaatttttaaggtggtgtaccctgtggatgatcatcactttaaggtgatcctgcactatggcacactggtaatcgacggggttacgccgaacatgatccagtatttcggacggccgtatgaaggcatcgccgtgttcgacggcaaaaagatcactgtaacagggaccctgtggaacggcaacaaaattatcgacgagcgcctgatcacccccgacggctccatgctgttccgagtaaccatcaacccc

SEQ ID NO: 1118 - protein, 159 aa, Artificial Sequence
  Synthetic
MVFTLEDFVGDWEQTAAYNLDQVLEQGGVSSLFQNLAVSVTPIQRIVLSGENALKIDIHVIIPYEGLSADQMAQIEKIFKVVYPVDDHHFKVILHYGTLVIDGVTPNMIQYFGRPYEGIAVFDGKKITVTGTLWNGNKIIDERLITPDGSMLFRVTINP

SEQ ID NO: 1119 - DNA, 477 bp, Artificial Sequence
  Synthetic
atggtcttcacactcgaagatttcgttggggactgggaacagacagccgcctacaacctggaccaagtccttgaacagggaggtgtgtccagtttgtttcagaatctcgccgtgtccgtaactccgatccaaaggattgtcctgagcggtgaaaatgccctgaagatcgacatccatgtcatcatcccgtatgaaggtctgagcgccgaccaaatggcccagatcgaaaaaatttttaaggtggtgtaccctgtggatgatcatcactttaaggtgatcctgcactatggcacactggtaatcgacggggttacgccgaacatgatccggtatttcggacggccgtatgaaggcatcgccgtgttcgacggcaaaaagatcactgtaacagggaccctgtggaacggcaacaaaattatcgacgagcgcctgatcacccccgacggctccatgctgttccgagtaaccatcaacccc

SEQ ID NO: 1120 - protein, 159 aa, Artificial Sequence
  Synthetic
MVFTLEDFVGDWEQTAAYNLDQVLEQGGVSSLFQNLAVSVTPIQRIVLSGENALKIDIHVIIPYEGLSADQMAQIEKIFKVVYPVDDHHFKVILHYGTLVIDGVTPNMIRYFGRPYEGIAVFDGKKITVTGTLWNGNKIIDERLITPDGSMLFRVTINP

SEQ ID NO: 1121 - DNA, 477 bp, Artificial Sequence
  Synthetic
atggtcttcacactcgaagatttcgttggggactgggaacagacagccgcctacaacctggaccaagtccttgaacagggaggtgtgtccagtttgtttcagaatctcgccgtgtccgtaactccgatccaaaggattgtcctgagcggtgaaaatgccctgaagatcgacatccatgtcatcatcccgtatgaaggtctgagcgccgaccaaatggcccagatcgaaaaaatttttaaggtggtgtaccctgtggatgatcatcactttaaggtgatcctgcactatggcacactggtaatcgacggggttacgccgaacatgatcagctatttcggacggccgtatgaaggcatcgccgtgttcgacggcaaaaagatcactgtaacagggaccctgtggaacggcaacaaaattatcgacgagcgcctgatcacccccgacggctccatgctgttccgagtaaccatcaacccc

SEQ ID NO: 1122 - protein, 159 aa, Artificial Sequence
  Synthetic
MVFTLEDFVGDWEQTAAYNLDQVLEQGGVSSLFQNLAVSVTPIQRIVLSGENALKIDIHVIIPYEGLSADQMAQIEKIFKVVYPVDDHHFKVILHYGTLVIDGVTPNMISYFGRPYEGIAVFDGKKITVTGTLWNGNKIIDERLITPDGSMLFRVTINP

SEQ ID NO: 1123 - DNA, 477 bp, Artificial Sequence
  Synthetic
atggtcttcacactcgaagatttcgttggggactgggaacagacagccgcctacaacctggaccaagtccttgaacagggaggtgtgtccagtttgtttcagaatctcgccgtgtccgtaactccgatccaaaggattgtcctgagcggtgaaaatgccctgaagatcgacatccatgtcatcatcccgtatgaaggtctgagcgccgaccaaatggcccagatcgaaaaaatttttaaggtggtgtaccctgtggatgatcatcactttaaggtgatcctgcactatggcacactggtaatcgacggggttacgccgaacatgatcacctatttcggacggccgtatgaaggcatcgccgtgttcgacggcaaaaagatcactgtaacagggaccctgtggaacggcaacaaaattatcgacgagcgcctgatcacccccgacggctccatgctgttccgagtaaccatcaacccc

SEQ ID NO: 1124 - protein, 159 aa, Artificial Sequence
  Synthetic
MVFTLEDFVGDWEQTAAYNLDQVLEQGGVSSLFQNLAVSVTPIQRIVLSGENALKIDIHVIIPYEGLSADQMAQIEKIFKVVYPVDDHHFKVILHYGTLVIDGVTPNMITYFGRPYEGIAVFDGKKITVTGTLWNGNKIIDERLITPDGSMLFRVTINP

SEQ ID NO: 1125 - DNA, 477 bp, Artificial Sequence
  Synthetic
atggtcttcacactcgaagatttcgttggggactgggaacagacagccgcctacaacctggaccaagtccttgaacagggaggtgtgtccagtttgtttcagaatctcgccgtgtccgtaactccgatccaaaggattgtcctgagcggtgaaaatgccctgaagatcgacatccatgtcatcatcccgtatgaaggtctgagcgccgaccaaatggcccagatcgaaaaaatttttaaggtggtgtaccctgtggatgatcatcactttaaggtgatcctgcactatggcacactggtaatcgacggggttacgccgaacatgatcgtgtatttcggacggccgtatgaaggcatcgccgtgttcgacggcaaaaagatcactgtaacagggaccctgtggaacggcaacaaaattatcgacgagcgcctgatcacccccgacggctccatgctgttccgagtaaccatcaacccc

SEQ ID NO: 1126 - protein, 159 aa, Artificial Sequence
  Synthetic
MVFTLEDFVGDWEQTAAYNLDQVLEQGGVSSLFQNLAVSVTPIQRIVLSGENALKIDIHVIIPYEGLSADQMAQIEKIFKVVYPVDDHHFKVILHYGTLVIDGVTPNMIVYFGRPYEGIAVFDGKKITVTGTLWNGNKIIDERLITPDGSMLFRVTINP

SEQ ID NO: 1127 - DNA, 477 bp, Artificial Sequence
  Synthetic
atggtcttcacactcgaagatttcgttggggactgggaacagacagccgcctacaacctggaccaagtccttgaacagggaggtgtgtccagtttgtttcagaatctcgccgtgtccgtaactccgatccaaaggattgtcctgagcggtgaaaatgccctgaagatcgacatccatgtcatcatcccgtatgaaggtctgagcgccgaccaaatggcccagatcgaaaaaatttttaaggtggtgtaccctgtggatgatcatcactttaaggtgatcctgcactatggcacactggtaatcgacggggttacgccgaacatgatctggtatttcggacggccgtatgaaggcatcgccgtgttcgacggcaaaaagatcactgtaacagggaccctgtggaacggcaacaaaattatcgacgagcgcctgatcacccccgacggctccatgctgttccgagtaaccatcaacccc

SEQ ID NO: 1128 - protein, 159 aa, Artificial Sequence
  Synthetic
MVFTLEDFVGDWEQTAAYNLDQVLEQGGVSSLFQNLAVSVTPIQRIVLSGENALKIDIHVIIPYEGLSADQMAQIEKIFKVVYPVDDHHFKVILHYGTLVIDGVTPNMIWYFGRPYEGIAVFDGKKITVTGTLWNGNKIIDERLITPDGSMLFRVTINP

SEQ ID NO: 1129 - DNA, 477 bp, Artificial Sequence
  Synthetic
atggtcttcacactcgaagatttcgttggggactgggaacagacagccgcctacaacctggaccaagtccttgaacagggaggtgtgtccagtttgtttcagaatctcgccgtgtccgtaactccgatccaaaggattgtcctgagcggtgaaaatgccctgaagatcgacatccatgtcatcatcccgtatgaaggtctgagcgccgaccaaatggcccagatcgaaaaaatttttaaggtggtgtaccctgtggatgatcatcactttaaggtgatcctgcactatggcacactggtaatcgacggggttacgccgaacatgatctactatttcggacggccgtatgaaggcatcgccgtgttcgacggcaaaaagatcactgtaacagggaccctgtggaacggcaacaaaattatcgacgagcgcctgatcacccccgacggctccatgctgttccgagtaaccatcaacccc

SEQ ID NO: 1130 - protein, 159 aa, Artificial Sequence
  Synthetic
MVFTLEDFVGDWEQTAAYNLDQVLEQGGVSSLFQNLAVSVTPIQRIVLSGENALKIDIHVIIPYEGLSADQMAQIEKIFKVVYPVDDHHFKVILHYGTLVIDGVTPNMIYYFGRPYEGIAVFDGKKITVTGTLWNGNKIIDERLITPDGSMLFRVTINP

SEQ ID NO: 1131 - DNA, 477 bp, Artificial Sequence
  Synthetic
atggtcttcacactcgaagatttcgttggggactgggaacagacagccgcctacaacctggaccaagtccttgaacagggaggtgtgtccagtttgtttcagaatctcgccgtgtccgtaactccgatccaaaggattgtcctgagcggtgaaaatgccctgaagatcgacatccatgtcatcatcccgtatgaaggtctgagcgccgaccaaatggcccagatcgaaaaaatttttaaggtggtgtaccctgtggatgatcatcactttaaggtgatcctgcactatggcacactggtaatcgacggggttacgccgaacatgatcaactatttcggacggccgtatgaaggcatcgccgtgttcgacggcaaaaagatcactgtaacagggaccctgtggaacggcaacaaaattatcgacgagcgcctgatcgcccccgacggctccatgctgttccgagtaaccatcaacccc

SEQ ID NO: 1132 - protein, 159 aa, Artificial Sequence
  Synthetic
MVFTLEDFVGDWEQTAAYNLDQVLEQGGVSSLFQNLAVSVTPIQRIVLSGENALKIDIHVIIPYEGLSADQMAQIEKIFKVVYPVDDHHFKVILHYGTLVIDGVTPNMINYFGRPYEGIAVFDGKKITVTGTLWNGNKIIDERLIAPDGSMLFRVTINP

SEQ ID NO: 1133 - DNA, 477 bp, Artificial Sequence
  Synthetic
atggtcttcacactcgaagatttcgttggggactgggaacagacagccgcctacaacctggaccaagtccttgaacagggaggtgtgtccagtttgtttcagaatctcgccgtgtccgtaactccgatccaaaggattgtcctgagcggtgaaaatgccctgaagatcgacatccatgtcatcatcccgtatgaaggtctgagcgccgaccaaatggcccagatcgaaaaaatttttaaggtggtgtaccctgtggatgatcatcactttaaggtgatcctgcactatggcacactggtaatcgacggggttacgccgaacatgatcaactatttcggacggccgtatgaaggcatcgccgtgttcgacggcaaaaagatcactgtaacagggaccctgtggaacggcaacaaaattatcgacgagcgcctgatctgccccgacggctccatgctgttccgagtaaccatcaacccc

SEQ ID NO: 1134 - protein, 159 aa, Artificial Sequence
  Synthetic
MVFTLEDFVGDWEQTAAYNLDQVLEQGGVSSLFQNLAVSVTPIQRIVLSGENALKIDIHVIIPYEGLSADQMAQIEKIFKVVYPVDDHHFKVILHYGTLVIDGVTPNMINYFGRPYEGIAVFDGKKITVTGTLWNGNKIIDERLICPDGSMLFRVTINP

SEQ ID NO: 1135 - DNA, 477 bp, Artificial Sequence
  Synthetic
atggtcttcacactcgaagatttcgttggggactgggaacagacagccgcctacaacctggaccaagtccttgaacagggaggtgtgtccagtttgtttcagaatctcgccgtgtccgtaactccgatccaaaggattgtcctgagcggtgaaaatgccctgaagatcgacatccatgtcatcatcccgtatgaaggtctgagcgccgaccaaatggcccagatcgaaaaaatttttaaggtggtgtaccctgtggatgatcatcactttaaggtgatcctgcactatggcacactggtaatcgacggggttacgccgaacatgatcaactatttcggacggccgtatgaaggcatcgccgtgttcgacggcaaaaagatcactgtaacagggaccctgtggaacggcaacaaaattatcgacgagcgcctgatcgaccccgacggctccatgctgttccgagtaaccatcaacccc

SEQ ID NO: 1136 - protein, 159 aa, Artificial Sequence
  Synthetic
MVFTLEDFVGDWEQTAAYNLDQVLEQGGVSSLFQNLAVSVTPIQRIVLSGENALKIDIHVIIPYEGLSADQMAQIEKIFKVVYPVDDHHFKVILHYGTLVIDGVTPNMINYFGRPYEGIAVFDGKKITVTGTLWNGNKIIDERLIDPDGSMLFRVTINP

SEQ ID NO: 1137 - DNA, 477 bp, Artificial Sequence
  Synthetic
atggtcttcacactcgaagatttcgttggggactgggaacagacagccgcctacaacctggaccaagtccttgaacagggaggtgtgtccagtttgtttcagaatctcgccgtgtccgtaactccgatccaaaggattgtcctgagcggtgaaaatgccctgaagatcgacatccatgtcatcatcccgtatgaaggtctgagcgccgaccaaatggcccagatcgaaaaaatttttaaggtggtgtaccctgtggatgatcatcactttaaggtgatcctgcactatggcacactggtaatcgacggggttacgccgaacatgatcaactatttcggacggccgtatgaaggcatcgccgtgttcgacggcaaaaagatcactgtaacagggaccctgtggaacggcaacaaaattatcgacgagcgcctgatcgagcccgacggctccatgctgttccgagtaaccatcaacccc

SEQ ID NO: 1138 - protein, 159 aa, Artificial Sequence
  Synthetic
MVFTLEDFVGDWEQTAAYNLDQVLEQGGVSSLFQNLAVSVTPIQRIVLSGENALKIDIHVIIPYEGLSADQMAQIEKIFKVVYPVDDHHFKVILHYGTLVIDGVTPNMINYFGRPYEGIAVFDGKKITVTGTLWNGNKIIDERLIEPDGSMLFRVTINP

SEQ ID NO: 1139 - DNA, 477 bp, Artificial Sequence
  Synthetic
atggtcttcacactcgaagatttcgttggggactgggaacagacagccgcctacaacctggaccaagtccttgaacagggaggtgtgtccagtttgtttcagaatctcgccgtgtccgtaactccgatccaaaggattgtcctgagcggtgaaaatgccctgaagatcgacatccatgtcatcatcccgtatgaaggtctgagcgccgaccaaatggcccagatcgaaaaaatttttaaggtggtgtaccctgtggatgatcatcactttaaggtgatcctgcactatggcacactggtaatcgacggggttacgccgaacatgatcaactatttcggacggccgtatgaaggcatcgccgtgttcgacggcaaaaagatcactgtaacagggaccctgtggaacggcaacaaaattatcgacgagcgcctgatcttccccgacggctccatgctgttccgagtaaccatcaacccc

SEQ ID NO: 1140 - protein, 159 aa, Artificial Sequence
  Synthetic
MVFTLEDFVGDWEQTAAYNLDQVLEQGGVSSLFQNLAVSVTPIQRIVLSGENALKIDIHVIIPYEGLSADQMAQIEKIFKVVYPVDDHHFKVILHYGTLVIDGVTPNMINYFGRPYEGIAVFDGKKITVTGTLWNGNKIIDERLIFPDGSMLFRVTINP

SEQ ID NO: 1141 - DNA, 477 bp, Artificial Sequence
  Synthetic
atggtcttcacactcgaagatttcgttggggactgggaacagacagccgcctacaacctggaccaagtccttgaacagggaggtgtgtccagtttgtttcagaatctcgccgtgtccgtaactccgatccaaaggattgtcctgagcggtgaaaatgccctgaagatcgacatccatgtcatcatcccgtatgaaggtctgagcgccgaccaaatggcccagatcgaaaaaatttttaaggtggtgtaccctgtggatgatcatcactttaaggtgatcctgcactatggcacactggtaatcgacggggttacgccgaacatgatcaactatttcggacggccgtatgaaggcatcgccgtgttcgacggcaaaaagatcactgtaacagggaccctgtggaacggcaacaaaattatcgacgagcgcctgatcggccccgacggctccatgctgttccgagtaaccatcaacccc

SEQ ID NO: 1142 - protein, 159 aa, Artificial Sequence
  Synthetic
MVFTLEDFVGDWEQTAAYNLDQVLEQGGVSSLFQNLAVSVTPIQRIVLSGENALKIDIHVIIPYEGLSADQMAQIEKIFKVVYPVDDHHFKVILHYGTLVIDGVTPNMINYFGRPYEGIAVFDGKKITVTGTLWNGNKIIDERLIGPDGSMLFRVTINP

SEQ ID NO: 1143 - DNA, 477 bp, Artificial Sequence
  Synthetic
atggtcttcacactcgaagatttcgttggggactgggaacagacagccgcctacaacctggaccaagtccttgaacagggaggtgtgtccagtttgtttcagaatctcgccgtgtccgtaactccgatccaaaggattgtcctgagcggtgaaaatgccctgaagatcgacatccatgtcatcatcccgtatgaaggtctgagcgccgaccaaatggcccagatcgaaaaaatttttaaggtggtgtaccctgtggatgatcatcactttaaggtgatcctgcactatggcacactggtaatcgacggggttacgccgaacatgatcaactatttcggacggccgtatgaaggcatcgccgtgttcgacggcaaaaagatcactgtaacagggaccctgtggaacggcaacaaaattatcgacgagcgcctgatccaccccgacggctccatgctgttccgagtaaccatcaacccc

SEQ ID NO: 1144 - protein, 159 aa, Artificial Sequence
  Synthetic
MVFTLEDFVGDWEQTAAYNLDQVLEQGGVSSLFQNLAVSVTPIQRIVLSGENALKIDIHVIIPYEGLSADQMAQIEKIFKVVYPVDDHHFKVILHYGTLVIDGVTPNMINYFGRPYEGIAVFDGKKITVTGTLWNGNKIIDERLIHPDGSMLFRVTINP

SEQ ID NO: 1145 - DNA, 477 bp, Artificial Sequence
  Synthetic
atggtcttcacactcgaagatttcgttggggactgggaacagacagccgcctacaacctggaccaagtccttgaacagggaggtgtgtccagtttgtttcagaatctcgccgtgtccgtaactccgatccaaaggattgtcctgagcggtgaaaatgccctgaagatcgacatccatgtcatcatcccgtatgaaggtctgagcgccgaccaaatggcccagatcgaaaaaatttttaaggtggtgtaccctgtggatgatcatcactttaaggtgatcctgcactatggcacactggtaatcgacggggttacgccgaacatgatcaactatttcggacggccgtatgaaggcatcgccgtgttcgacggcaaaaagatcactgtaacagggaccctgtggaacggcaacaaaattatcgacgagcgcctgatcatccccgacggctccatgctgttccgagtaaccatcaacccc

SEQ ID NO: 1146 - protein, 159 aa, Artificial Sequence
  Synthetic
MVFTLEDFVGDWEQTAAYNLDQVLEQGGVSSLFQNLAVSVTPIQRIVLSGENALKIDIHVIIPYEGLSADQMAQIEKIFKVVYPVDDHHFKVILHYGTLVIDGVTPNMINYFGRPYEGIAVFDGKKITVTGTLWNGNKIIDERLIIPDGSMLFRVTINP

SEQ ID NO: 1147 - DNA, 477 bp, Artificial Sequence
  Synthetic
atggtcttcacactcgaagatttcgttggggactgggaacagacagccgcctacaacctggaccaagtccttgaacagggaggtgtgtccagtttgtttcagaatctcgccgtgtccgtaactccgatccaaaggattgtcctgagcggtgaaaatgccctgaagatcgacatccatgtcatcatcccgtatgaaggtctgagcgccgaccaaatggcccagatcgaaaaaatttttaaggtggtgtaccctgtggatgatcatcactttaaggtgatcctgcactatggcacactggtaatcgacggggttacgccgaacatgatcaactatttcggacggccgtatgaaggcatcgccgtgttcgacggcaaaaagatcactgtaacagggaccctgtggaacggcaacaaaattatcgacgagcgcctgatcaagcccgacggctccatgctgttccgagtaaccatcaacccc

SEQ ID NO: 1148 - protein, 159 aa, Artificial Sequence
  Synthetic
MVFTLEDFVGDWEQTAAYNLDQVLEQGGVSSLFQNLAVSVTPIQRIVLSGENALKIDIHVIIPYEGLSADQMAQIEKIFKVVYPVDDHHFKVILHYGTLVIDGVTPNMINYFGRPYEGIAVFDGKKITVTGTLWNGNKIIDERLIKPDGSMLFRVTINP

SEQ ID NO: 1149 - DNA, 477 bp, Artificial Sequence
  Synthetic
atggtcttcacactcgaagatttcgttggggactgggaacagacagccgcctacaacctggaccaagtccttgaacagggaggtgtgtccagtttgtttcagaatctcgccgtgtccgtaactccgatccaaaggattgtcctgagcggtgaaaatgccctgaagatcgacatccatgtcatcatcccgtatgaaggtctgagcgccgaccaaatggcccagatcgaaaaaatttttaaggtggtgtaccctgtggatgatcatcactttaaggtgatcctgcactatggcacactggtaatcgacggggttacgccgaacatgatcaactatttcggacggccgtatgaaggcatcgccgtgttcgacggcaaaaagatcactgtaacagggaccctgtggaacggcaacaaaattatcgacgagcgcctgatcctgcccgacggctccatgctgttccgagtaaccatcaacccc

SEQ ID NO: 1150 - protein, 159 aa, Artificial Sequence
  Synthetic
MVFTLEDFVGDWEQTAAYNLDQVLEQGGVSSLFQNLAVSVTPIQRIVLSGENALKIDIHVIIPYEGLSADQMAQIEKIFKVVYPVDDHHFKVILHYGTLVIDGVTPNMINYFGRPYEGIAVFDGKKITVTGTLWNGNKIIDERLILPDGSMLFRVTINP

SEQ ID NO: 1151 - DNA, 477 bp, Artificial Sequence
  Synthetic
atggtcttcacactcgaagatttcgttggggactgggaacagacagccgcctacaacctggaccaagtccttgaacagggaggtgtgtccagtttgtttcagaatctcgccgtgtccgtaactccgatccaaaggattgtcctgagcggtgaaaatgccctgaagatcgacatccatgtcatcatcccgtatgaaggtctgagcgccgaccaaatggcccagatcgaaaaaatttttaaggtggtgtaccctgtggatgatcatcactttaaggtgatcctgcactatggcacactggtaatcgacggggttacgccgaacatgatcaactatttcggacggccgtatgaaggcatcgccgtgttcgacggcaaaaagatcactgtaacagggaccctgtggaacggcaacaaaattatcgacgagcgcctgatcatgcccgacggctccatgctgttccgagtaaccatcaacccc

SEQ ID NO: 1152 - protein, 159 aa, Artificial Sequence
  Synthetic
MVFTLEDFVGDWEQTAAYNLDQVLEQGGVSSLFQNLAVSVTPIQRIVLSGENALKIDIHVIIPYEGLSADQMAQIEKIFKVVYPVDDHHFKVILHYGTLVIDGVTPNMINYFGRPYEGIAVFDGKKITVTGTLWNGNKIIDERLIMPDGSMLFRVTINP

SEQ ID NO: 1153 - DNA, 477 bp, Artificial Sequence; identical to SEQ ID NO: 923
  Synthetic

SEQ ID NO: 1154 - protein, 159 aa, Artificial Sequence; identical to SEQ ID NO: 924
  Synthetic

SEQ ID NO: 1155 - DNA, 477 bp, Artificial Sequence
  Synthetic
atggtcttcacactcgaagatttcgttggggactgggaacagacagccgcctacaacctggaccaagtccttgaacagggaggtgtgtccagtttgtttcagaatctcgccgtgtccgtaactccgatccaaaggattgtcctgagcggtgaaaatgccctgaagatcgacatccatgtcatcatcccgtatgaaggtctgagcgccgaccaaatggcccagatcgaaaaaatttttaaggtggtgtaccctgtggatgatcatcactttaaggtgatcctgcactatggcacactggtaatcgacggggttacgccgaacatgatcaactatttcggacggccgtatgaaggcatcgccgtgttcgacggcaaaaagatcactgtaacagggaccctgtggaacggcaacaaaattatcgacgagcgcctgatcccccccgacggctccatgctgttccgagtaaccatcaacccc

SEQ ID NO: 1156 - protein, 159 aa, Artificial Sequence
  Synthetic
MVFTLEDFVGDWEQTAAYNLDQVLEQGGVSSLFQNLAVSVTPIQRIVLSGENALKIDIHVIIPYEGLSADQMAQIEKIFKVVYPVDDHHFKVILHYGTLVIDGVTPNMINYFGRPYEGIAVFDGKKITVTGTLWNGNKIIDERLIPPDGSMLFRVTINP

SEQ ID NO: 1157 - DNA, 477 bp, Artificial Sequence
  Synthetic
atggtcttcacactcgaagatttcgttggggactgggaacagacagccgcctacaacctggaccaagtccttgaacagggaggtgtgtccagtttgtttcagaatctcgccgtgtccgtaactccgatccaaaggattgtcctgagcggtgaaaatgccctgaagatcgacatccatgtcatcatcccgtatgaaggtctgagcgccgaccaaatggcccagatcgaaaaaatttttaaggtggtgtaccctgtggatgatcatcactttaaggtgatcctgcactatggcacactggtaatcgacggggttacgccgaacatgatcaactatttcggacggccgtatgaaggcatcgccgtgttcgacggcaaaaagatcactgtaacagggaccctgtggaacggcaacaaaattatcgacgagcgcctgatccagcccgacggctccatgctgttccgagtaaccatcaacccc

SEQ ID NO: 1158 - protein, 159 aa, Artificial Sequence
  Synthetic
MVFTLEDFVGDWEQTAAYNLDQVLEQGGVSSLFQNLAVSVTPIQRIVLSGENALKIDIHVIIPYEGLSADQMAQIEKIFKVVYPVDDHHFKVILHYGTLVIDGVTPNMINYFGRPYEGIAVFDGKKITVTGTLWNGNKIIDERLIQPDGSMLFRVTINP

SEQ ID NO: 1159 - DNA, 477 bp, Artificial Sequence
  Synthetic
atggtcttcacactcgaagatttcgttggggactgggaacagacagccgcctacaacctggaccaagtccttgaacagggaggtgtgtccagtttgtttcagaatctcgccgtgtccgtaactccgatccaaaggattgtcctgagcggtgaaaatgccctgaagatcgacatccatgtcatcatcccgtatgaaggtctgagcgccgaccaaatggcccagatcgaaaaaatttttaaggtggtgtaccctgtggatgatcatcactttaaggtgatcctgcactatggcacactggtaatcgacggggttacgccgaacatgatcaactatttcggacggccgtatgaaggcatcgccgtgttcgacggcaaaaagatcactgtaacagggaccctgtggaacggcaacaaaattatcgacgagcgcctgatccggcccgacggctccatgctgttccgagtaaccatcaacccc

SEQ ID NO: 1160 - protein, 159 aa, Artificial Sequence
  Synthetic
MVFTLEDFVGDWEQTAAYNLDQVLEQGGVSSLFQNLAVSVTPIQRIVLSGENALKIDIHVIIPYEGLSADQMAQIEKIFKVVYPVDDHHFKVILHYGTLVIDGVTPNMINYFGRPYEGIAVFDGKKITVTGTLWNGNKIIDERLIRPDGSMLFRVTINP

SEQ ID NO: 1161 - DNA, 477 bp, Artificial Sequence
  Synthetic
atggtcttcacactcgaagatttcgttggggactgggaacagacagccgcctacaacctggaccaagtccttgaacagggaggtgtgtccagtttgtttcagaatctcgccgtgtccgtaactccgatccaaaggattgtcctgagcggtgaaaatgccctgaagatcgacatccatgtcatcatcccgtatgaaggtctgagcgccgaccaaatggcccagatcgaaaaaatttttaaggtggtgtaccctgtggatgatcatcactttaaggtgatcctgcactatggcacactggtaatcgacggggttacgccgaacatgatcaactatttcggacggccgtatgaaggcatcgccgtgttcgacggcaaaaagatcactgtaacagggaccctgtggaacggcaacaaaattatcgacgagcgcctgatcagccccgacggctccatgctgttccgagtaaccatcaacccc

SEQ ID NO: 1162 - protein, 159 aa, Artificial Sequence
  Synthetic
MVFTLEDFVGDWEQTAAYNLDQVLEQGGVSSLFQNLAVSVTPIQRIVLSGENALKIDIHVIIPYEGLSADQMAQIEKIFKVVYPVDDHHFKVILHYGTLVIDGVTPNMINYFGRPYEGIAVFDGKKITVTGTLWNGNKIIDERLISPDGSMLFRVTINP

SEQ ID NO: 1163 - DNA, 477 bp, Artificial Sequence
  Synthetic
atggtcttcacactcgaagatttcgttggggactgggaacagacagccgcctacaacctggaccaagtccttgaacagggaggtgtgtccagtttgtttcagaatctcgccgtgtccgtaactccgatccaaaggattgtcctgagcggtgaaaatgccctgaagatcgacatccatgtcatcatcccgtatgaaggtctgagcgccgaccaaatggcccagatcgaaaaaatttttaaggtggtgtaccctgtggatgatcatcactttaaggtgatcctgcactatggcacactggtaatcgacggggttacgccgaacatgatcaactatttcggacggccgtatgaaggcatcgccgtgttcgacggcaaaaagatcactgtaacagggaccctgtggaacggcaacaaaattatcgacgagcgcctgatcgtgcccgacggctccatgctgttccgagtaaccatcaacccc

SEQ ID NO: 1164 - protein, 159 aa, Artificial Sequence
  Synthetic
MVFTLEDFVGDWEQTAAYNLDQVLEQGGVSSLFQNLAVSVTPIQRIVLSGENALKIDIHVIIPYEGLSADQMAQIEKIFKVVYPVDDHHFKVILHYGTLVIDGVTPNMINYFGRPYEGIAVFDGKKITVTGTLWNGNKIIDERLIVPDGSMLFRVTINP

SEQ ID NO: 1165 - DNA, 477 bp, Artificial Sequence
  Synthetic
atggtcttcacactcgaagatttcgttggggactgggaacagacagccgcctacaacctggaccaagtccttgaacagggaggtgtgtccagtttgtttcagaatctcgccgtgtccgtaactccgatccaaaggattgtcctgagcggtgaaaatgccctgaagatcgacatccatgtcatcatcccgtatgaaggtctgagcgccgaccaaatggcccagatcgaaaaaatttttaaggtggtgtaccctgtggatgatcatcactttaaggtgatcctgcactatggcacactggtaatcgacggggttacgccgaacatgatcaactatttcggacggccgtatgaaggcatcgccgtgttcgacggcaaaaagatcactgtaacagggaccctgtggaacggcaacaaaattatcgacgagcgcctgatctggcccgacggctccatgctgttccgagtaaccatcaacccc

SEQ ID NO: 1166 - protein, 159 aa, Artificial Sequence
  Synthetic
MVFTLEDFVGDWEQTAAYNLDQVLEQGGVSSLFQNLAVSVTPIQRIVLSGENALKIDIHVIIPYEGLSADQMAQIEKIFKVVYPVDDHHFKVILHYGTLVIDGVTPNMINYFGRPYEGIAVFDGKKITVTGTLWNGNKIIDERLIWPDGSMLFRVTINP

SEQ ID NO: 1167 - DNA, 477 bp, Artificial Sequence
  Synthetic
atggtcttcacactcgaagatttcgttggggactgggaacagacagccgcctacaacctggaccaagtccttgaacagggaggtgtgtccagtttgtttcagaatctcgccgtgtccgtaactccgatccaaaggattgtcctgagcggtgaaaatgccctgaagatcgacatccatgtcatcatcccgtatgaaggtctgagcgccgaccaaatggcccagatcgaaaaaatttttaaggtggtgtaccctgtggatgatcatcactttaaggtgatcctgcactatggcacactggtaatcgacggggttacgccgaacatgatcaactatttcggacggccgtatgaaggcatcgccgtgttcgacggcaaaaagatcactgtaacagggaccctgtggaacggcaacaaaattatcgacgagcgcctgatctaccccgacggctccatgctgttccgagtaaccatcaacccc

SEQ ID NO: 1168 - protein, 159 aa, Artificial Sequence
  Synthetic
MVFTLEDFVGDWEQTAAYNLDQVLEQGGVSSLFQNLAVSVTPIQRIVLSGENALKIDIHVIIPYEGLSADQMAQIEKIFKVVYPVDDHHFKVILHYGTLVIDGVTPNMINYFGRPYEGIAVFDGKKITVTGTLWNGNKIIDERLIYPDGSMLFRVTINP

SEQ ID NO: 1169 - DNA, 477 bp, Artificial Sequence
  Synthetic
atggtcttcacactcgaagatttcgttggggactgggaacagacagccgcctacaacctggaccaagtccttgaacagggaggtgtgtccagtttgtttcagaatctcgccgtgtccgtaactccgatccaaaggattgtcctgagcggtgaaaatgccctgaagatcgacatccatgtcatcatcccgtatgaaggtctgagcgccgaccaaatggcccagatcgaaaaaatttttaaggtggtgtaccctgtggatgatcatcactttaaggtgatcctgcactatggcacactggtaatcgacggggttacgccgaacatgatcaactatttcggacggccgtatgaaggcatcgccgtgttcgacggcaaaaagatcactgtaacagggaccctgtggaacggcaacaaaattatcgacgagcgcctgatcacccccgacggctccatgctgttccgagtaaccatcaacgcc

SEQ ID NO: 1170 - protein, 159 aa, Artificial Sequence
  Synthetic
MVFTLEDFVGDWEQTAAYNLDQVLEQGGVSSLFQNLAVSVTPIQRIVLSGENALKIDIHVIIPYEGLSADQMAQIEKIFKVVYPVDDHHFKVILHYGTLVIDGVTPNMINYFGRPYEGIAVFDGKKITVTGTLWNGNKIIDERLITPDGSMLFRVTINA

SEQ ID NO: 1171 - DNA, 477 bp, Artificial Sequence
  Synthetic
atggtcttcacactcgaagatttcgttggggactgggaacagacagccgcctacaacctggaccaagtccttgaacagggaggtgtgtccagtttgtttcagaatctcgccgtgtccgtaactccgatccaaaggattgtcctgagcggtgaaaatgccctgaagatcgacatccatgtcatcatcccgtatgaaggtctgagcgccgaccaaatggcccagatcgaaaaaatttttaaggtggtgtaccctgtggatgatcatcactttaaggtgatcctgcactatggcacactggtaatcgacggggttacgccgaacatgatcaactatttcggacggccgtatgaaggcatcgccgtgttcgacggcaaaaagatcactgtaacagggaccctgtggaacggcaacaaaattatcgacgagcgcctgatcacccccgacggctccatgctgttccgagtaaccatcaactgc

SEQ ID NO: 1172 - protein, 159 aa, Artificial Sequence
  Synthetic
MVFTLEDFVGDWEQTAAYNLDQVLEQGGVSSLFQNLAVSVTPIQRIVLSGENALKIDIHVIIPYEGLSADQMAQIEKIFKVVYPVDDHHFKVILHYGTLVIDGVTPNMINYFGRPYEGIAVFDGKKITVTGTLWNGNKIIDERLITPDGSMLFRVTINC

SEQ ID NO: 1173 - DNA, 477 bp, Artificial Sequence
  Synthetic
atggtcttcacactcgaagatttcgttggggactgggaacagacagccgcctacaacctggaccaagtccttgaacagggaggtgtgtccagtttgtttcagaatctcgccgtgtccgtaactccgatccaaaggattgtcctgagcggtgaaaatgccctgaagatcgacatccatgtcatcatcccgtatgaaggtctgagcgccgaccaaatggcccagatcgaaaaaatttttaaggtggtgtaccctgtggatgatcatcactttaaggtgatcctgcactatggcacactggtaatcgacggggttacgccgaacatgatcaactatttcggacggccgtatgaaggcatcgccgtgttcgacggcaaaaagatcactgtaacagggaccctgtggaacggcaacaaaattatcgacgagcgcctgatcacccccgacggctccatgctgttccgagtaaccatcaacgac

SEQ ID NO: 1174 - protein, 159 aa, Artificial Sequence
  Synthetic
MVFTLEDFVGDWEQTAAYNLDQVLEQGGVSSLFQNLAVSVTPIQRIVLSGENALKIDIHVIIPYEGLSADQMAQIEKIFKVVYPVDDHHFKVILHYGTLVIDGVTPNMINYFGRPYEGIAVFDGKKITVTGTLWNGNKIIDERLITPDGSMLFRVTIND

SEQ ID NO: 1175 - DNA, 477 bp, Artificial Sequence; identical to SEQ ID NO: 937
  Synthetic

SEQ ID NO: 1176 - protein, 159 aa, Artificial Sequence; identical to SEQ ID NO: 938
  Synthetic

SEQ ID NO: 1177 - DNA, 477 bp, Artificial Sequence
  Synthetic
atggtcttcacactcgaagatttcgttggggactgggaacagacagccgcctacaacctggaccaagtccttgaacagggaggtgtgtccagtttgtttcagaatctcgccgtgtccgtaactccgatccaaaggattgtcctgagcggtgaaaatgccctgaagatcgacatccatgtcatcatcccgtatgaaggtctgagcgccgaccaaatggcccagatcgaaaaaatttttaaggtggtgtaccctgtggatgatcatcactttaaggtgatcctgcactatggcacactggtaatcgacggggttacgccgaacatgatcaactatttcggacggccgtatgaaggcatcgccgtgttcgacggcaaaaagatcactgtaacagggaccctgtggaacggcaacaaaattatcgacgagcgcctgatcacccccgacggctccatgctgttccgagtaaccatcaacttc

SEQ ID NO: 1178 - protein, 159 aa, Artificial Sequence
  Synthetic
MVFTLEDFVGDWEQTAAYNLDQVLEQGGVSSLFQNLAVSVTPIQRIVLSGENALKIDIHVIIPYEGLSADQMAQIEKIFKVVYPVDDHHFKVILHYGTLVIDGVTPNMINYFGRPYEGIAVFDGKKITVTGTLWNGNKIIDERLITPDGSMLFRVTINF

SEQ ID NO: 1179 - DNA, 477 bp, Artificial Sequence
  Synthetic
atggtcttcacactcgaagatttcgttggggactgggaacagacagccgcctacaacctggaccaagtccttgaacagggaggtgtgtccagtttgtttcagaatctcgccgtgtccgtaactccgatccaaaggattgtcctgagcggtgaaaatgccctgaagatcgacatccatgtcatcatcccgtatgaaggtctgagcgccgaccaaatggcccagatcgaaaaaatttttaaggtggtgtaccctgtggatgatcatcactttaaggtgatcctgcactatggcacactggtaatcgacggggttacgccgaacatgatcaactatttcggacggccgtatgaaggcatcgccgtgttcgacggcaaaaagatcactgtaacagggaccctgtggaacggcaacaaaattatcgacgagcgcctgatcacccccgacggctccatgctgttccgagtaaccatcaacggc

SEQ ID NO: 1180 - protein, 159 aa, Artificial Sequence
  Synthetic
MVFTLEDFVGDWEQTAAYNLDQVLEQGGVSSLFQNLAVSVTPIQRIVLSGENALKIDIHVIIPYEGLSADQMAQIEKIFKVVYPVDDHHFKVILHYGTLVIDGVTPNMINYFGRPYEGIAVFDGKKITVTGTLWNGNKIIDERLITPDGSMLFRVTING

SEQ ID NO: 1181 - DNA, 477 bp, Artificial Sequence
  Synthetic
atggtcttcacactcgaagatttcgttggggactgggaacagacagccgcctacaacctggaccaagtccttgaacagggaggtgtgtccagtttgtttcagaatctcgccgtgtccgtaactccgatccaaaggattgtcctgagcggtgaaaatgccctgaagatcgacatccatgtcatcatcccgtatgaaggtctgagcgccgaccaaatggcccagatcgaaaaaatttttaaggtggtgtaccctgtggatgatcatcactttaaggtgatcctgcactatggcacactggtaatcgacggggttacgccgaacatgatcaactatttcggacggccgtatgaaggcatcgccgtgttcgacggcaaaaagatcactgtaacagggaccctgtggaacggcaacaaaattatcgacgagcgcctgatcacccccgacggctccatgctgttccgagtaaccatcaaccac

SEQ ID NO: 1182 - protein, 159 aa, Artificial Sequence
  Synthetic
MVFTLEDFVGDWEQTAAYNLDQVLEQGGVSSLFQNLAVSVTPIQRIVLSGENALKIDIHVIIPYEGLSADQMAQIEKIFKVVYPVDDHHFKVILHYGTLVIDGVTPNMINYFGRPYEGIAVFDGKKITVTGTLWNGNKIIDERLITPDGSMLFRVTINH

SEQ ID NO: 1183 - DNA, 477 bp, Artificial Sequence
  Synthetic
atggtcttcacactcgaagatttcgttggggactgggaacagacagccgcctacaacctggaccaagtccttgaacagggaggtgtgtccagtttgtttcagaatctcgccgtgtccgtaactccgatccaaaggattgtcctgagcggtgaaaatgccctgaagatcgacatccatgtcatcatcccgtatgaaggtctgagcgccgaccaaatggcccagatcgaaaaaatttttaaggtggtgtaccctgtggatgatcatcactttaaggtgatcctgcactatggcacactggtaatcgacggggttacgccgaacatgatcaactatttcggacggccgtatgaaggcatcgccgtgttcgacggcaaaaagatcactgtaacagggaccctgtggaacggcaacaaaattatcgacgagcgcctgatcacccccgacggctccatgctgttccgagtaaccatcaacatc

SEQ ID NO: 1184 - protein, 159 aa, Artificial Sequence
  Synthetic
MVFTLEDFVGDWEQTAAYNLDQVLEQGGVSSLFQNLAVSVTPIQRIVLSGENALKIDIHVIIPYEGLSADQMAQIEKIFKVVYPVDDHHFKVILHYGTLVIDGVTPNMINYFGRPYEGIAVFDGKKITVTGTLWNGNKIIDERLITPDGSMLFRVTINI

SEQ ID NO: 1185 - DNA, 477 bp, Artificial Sequence
  Synthetic
atggtcttcacactcgaagatttcgttggggactgggaacagacagccgcctacaacctggaccaagtccttgaacagggaggtgtgtccagtttgtttcagaatctcgccgtgtccgtaactccgatccaaaggattgtcctgagcggtgaaaatgccctgaagatcgacatccatgtcatcatcccgtatgaaggtctgagcgccgaccaaatggcccagatcgaaaaaatttttaaggtggtgtaccctgtggatgatcatcactttaaggtgatcctgcactatggcacactggtaatcgacggggttacgccgaacatgatcaactatttcggacggccgtatgaaggcatcgccgtgttcgacggcaaaaagatcactgtaacagggaccctgtggaacggcaacaaaattatcgacgagcgcctgatcacccccgacggctccatgctgttccgagtaaccatcaacaag

SEQ ID NO: 1186 - protein, 159 aa, Artificial Sequence
  Synthetic
MVFTLEDFVGDWEQTAAYNLDQVLEQGGVSSLFQNLAVSVTPIQRIVLSGENALKIDIHVIIPYEGLSADQMAQIEKIFKVVYPVDDHHFKVILHYGTLVIDGVTPNMINYFGRPYEGIAVFDGKKITVTGTLWNGNKIIDERLITPDGSMLFRVTINK

SEQ ID NO: 1187 - DNA, 477 bp, Artificial Sequence
  Synthetic
atggtcttcacactcgaagatttcgttggggactgggaacagacagccgcctacaacctggaccaagtccttgaacagggaggtgtgtccagtttgtttcagaatctcgccgtgtccgtaactccgatccaaaggattgtcctgagcggtgaaaatgccctgaagatcgacatccatgtcatcatcccgtatgaaggtctgagcgccgaccaaatggcccagatcgaaaaaatttttaaggtggtgtaccctgtggatgatcatcactttaaggtgatcctgcactatggcacactggtaatcgacggggttacgccgaacatgatcaactatttcggacggccgtatgaaggcatcgccgtgttcgacggcaaaaagatcactgtaacagggaccctgtggaacggcaacaaaattatcgacgagcgcctgatcacccccgacggctccatgctgttccgagtaaccatcaacctg

SEQ ID NO: 1188 - protein, 159 aa, Artificial Sequence
  Synthetic
MVFTLEDFVGDWEQTAAYNLDQVLEQGGVSSLFQNLAVSVTPIQRIVLSGENALKIDIHVIIPYEGLSADQMAQIEKIFKVVYPVDDHHFKVILHYGTLVIDGVTPNMINYFGRPYEGIAVFDGKKITVTGTLWNGNKIIDERLITPDGSMLFRVTINL

SEQ ID NO: 1189 - DNA, 477 bp, Artificial Sequence
  Synthetic
atggtcttcacactcgaagatttcgttggggactgggaacagacagccgcctacaacctggaccaagtccttgaacagggaggtgtgtccagtttgtttcagaatctcgccgtgtccgtaactccgatccaaaggattgtcctgagcggtgaaaatgccctgaagatcgacatccatgtcatcatcccgtatgaaggtctgagcgccgaccaaatggcccagatcgaaaaaatttttaaggtggtgtaccctgtggatgatcatcactttaaggtgatcctgcactatggcacactggtaatcgacggggttacgccgaacatgatcaactatttcggacggccgtatgaaggcatcgccgtgttcgacggcaaaaagatcactgtaacagggaccctgtggaacggcaacaaaattatcgacgagcgcctgatcacccccgacggctccatgctgttccgagtaaccatcaacatg

SEQ ID NO: 1190 - protein, 159 aa, Artificial Sequence
  Synthetic
MVFTLEDFVGDWEQTAAYNLDQVLEQGGVSSLFQNLAVSVTPIQRIVLSGENALKIDIHVIIPYEGLSADQMAQIEKIFKVVYPVDDHHFKVILHYGTLVIDGVTPNMINYFGRPYEGIAVFDGKKITVTGTLWNGNKIIDERLITPDGSMLFRVTINM

SEQ ID NO: 1191 - DNA, 477 bp, Artificial Sequence
  Synthetic
atggtcttcacactcgaagatttcgttggggactgggaacagacagccgcctacaacctggaccaagtccttgaacagggaggtgtgtccagtttgtttcagaatctcgccgtgtccgtaactccgatccaaaggattgtcctgagcggtgaaaatgccctgaagatcgacatccatgtcatcatcccgtatgaaggtctgagcgccgaccaaatggcccagatcgaaaaaatttttaaggtggtgtaccctgtggatgatcatcactttaaggtgatcctgcactatggcacactggtaatcgacggggttacgccgaacatgatcaactatttcggacggccgtatgaaggcatcgccgtgttcgacggcaaaaagatcactgtaacagggaccctgtggaacggcaacaaaattatcgacgagcgcctgatcacccccgacggctccatgctgttccgagtaaccatcaacaac

SEQ ID NO: 1192 - protein, 159 aa, Artificial Sequence
  Synthetic
MVFTLEDFVGDWEQTAAYNLDQVLEQGGVSSLFQNLAVSVTPIQRIVLSGENALKIDIHVIIPYEGLSADQMAQIEKIFKVVYPVDDHHFKVILHYGTLVIDGVTPNMINYFGRPYEGIAVFDGKKITVTGTLWNGNKIIDERLITPDGSMLFRVTINN

SEQ ID NO: 1193 - DNA, 477 bp, Artificial Sequence
  Synthetic
atggtcttcacactcgaagatttcgttggggactgggaacagacagccgcctacaacctggaccaagtccttgaacagggaggtgtgtccagtttgtttcagaatctcgccgtgtccgtaactccgatccaaaggattgtcctgagcggtgaaaatgccctgaagatcgacatccatgtcatcatcccgtatgaaggtctgagcgccgaccaaatggcccagatcgaaaaaatttttaaggtggtgtaccctgtggatgatcatcactttaaggtgatcctgcactatggcacactggtaatcgacggggttacgccgaacatgatcaactatttcggacggccgtatgaaggcatcgccgtgttcgacggcaaaaagatcactgtaacagggaccctgtggaacggcaacaaaattatcgacgagcgcctgatcacccccgacggctccatgctgttccgagtaaccatcaaccag

SEQ ID NO: 1194 - protein, 159 aa, Artificial Sequence
  Synthetic
MVFTLEDFVGDWEQTAAYNLDQVLEQGGVSSLFQNLAVSVTPIQRIVLSGENALKIDIHVIIPYEGLSADQMAQIEKIFKVVYPVDDHHFKVILHYGTLVIDGVTPNMINYFGRPYEGIAVFDGKKITVTGTLWNGNKIIDERLITPDGSMLFRVTINQ

SEQ ID NO: 1195 - DNA, 477 bp, Artificial Sequence
  Synthetic
atggtcttcacactcgaagatttcgttggggactgggaacagacagccgcctacaacctggaccaagtccttgaacagggaggtgtgtccagtttgtttcagaatctcgccgtgtccgtaactccgatccaaaggattgtcctgagcggtgaaaatgccctgaagatcgacatccatgtcatcatcccgtatgaaggtctgagcgccgaccaaatggcccagatcgaaaaaatttttaaggtggtgtaccctgtggatgatcatcactttaaggtgatcctgcactatggcacactggtaatcgacggggttacgccgaacatgatcaactatttcggacggccgtatgaaggcatcgccgtgttcgacggcaaaaagatcactgtaacagggaccctgtggaacggcaacaaaattatcgacgagcgcctgatcacccccgacggctccatgctgttccgagtaaccatcaaccgg

SEQ ID NO: 1196 - protein, 159 aa, Artificial Sequence
  Synthetic
MVFTLEDFVGDWEQTAAYNLDQVLEQGGVSSLFQNLAVSVTPIQRIVLSGENALKIDIHVIIPYEGLSADQMAQIEKIFKVVYPVDDHHFKVILHYGTLVIDGVTPNMINYFGRPYEGIAVFDGKKITVTGTLWNGNKIIDERLITPDGSMLFRVTINR

SEQ ID NO: 1197 - DNA, 477 bp, Artificial Sequence
  Synthetic
atggtcttcacactcgaagatttcgttggggactgggaacagacagccgcctacaacctggaccaagtccttgaacagggaggtgtgtccagtttgtttcagaatctcgccgtgtccgtaactccgatccaaaggattgtcctgagcggtgaaaatgccctgaagatcgacatccatgtcatcatcccgtatgaaggtctgagcgccgaccaaatggcccagatcgaaaaaatttttaaggtggtgtaccctgtggatgatcatcactttaaggtgatcctgcactatggcacactggtaatcgacggggttacgccgaacatgatcaactatttcggacggccgtatgaaggcatcgccgtgttcgacggcaaaaagatcactgtaacagggaccctgtggaacggcaacaaaattatcgacgagcgcctgatcacccccgacggctccatgctgttccgagtaaccatcaacagc

SEQ ID NO: 1198 - protein, 159 aa, Artificial Sequence
  Synthetic
MVFTLEDFVGDWEQTAAYNLDQVLEQGGVSSLFQNLAVSVTPIQRIVLSGENALKIDIHVIIPYEGLSADQMAQIEKIFKVVYPVDDHHFKVILHYGTLVIDGVTPNMINYFGRPYEGIAVFDGKKITVTGTLWNGNKIIDERLITPDGSMLFRVTINS

SEQ ID NO: 1199 - DNA, 477 bp, Artificial Sequence
  Synthetic
atggtcttcacactcgaagatttcgttggggactgggaacagacagccgcctacaacctggaccaagtccttgaacagggaggtgtgtccagtttgtttcagaatctcgccgtgtccgtaactccgatccaaaggattgtcctgagcggtgaaaatgccctgaagatcgacatccatgtcatcatcccgtatgaaggtctgagcgccgaccaaatggcccagatcgaaaaaatttttaaggtggtgtaccctgtggatgatcatcactttaaggtgatcctgcactatggcacactggtaatcgacggggttacgccgaacatgatcaactatttcggacggccgtatgaaggcatcgccgtgttcgacggcaaaaagatcactgtaacagggaccctgtggaacggcaacaaaattatcgacgagcgcctgatcacccccgacggctccatgctgttccgagtaaccatcaacacc

SEQ ID NO: 1200 - protein, 159 aa, Artificial Sequence
  Synthetic
MVFTLEDFVGDWEQTAAYNLDQVLEQGGVSSLFQNLAVSVTPIQRIVLSGENALKIDIHVIIPYEGLSADQMAQIEKIFKVVYPVDDHHFKVILHYGTLVIDGVTPNMINYFGRPYEGIAVFDGKKITVTGTLWNGNKIIDERLITPDGSMLFRVTINT

SEQ ID NO: 1201 - DNA, 477 bp, Artificial Sequence
  Synthetic
atggtcttcacactcgaagatttcgttggggactgggaacagacagccgcctacaacctggaccaagtccttgaacagggaggtgtgtccagtttgtttcagaatctcgccgtgtccgtaactccgatccaaaggattgtcctgagcggtgaaaatgccctgaagatcgacatccatgtcatcatcccgtatgaaggtctgagcgccgaccaaatggcccagatcgaaaaaatttttaaggtggtgtaccctgtggatgatcatcactttaaggtgatcctgcactatggcacactggtaatcgacggggttacgccgaacatgatcaactatttcggacggccgtatgaaggcatcgccgtgttcgacggcaaaaagatcactgtaacagggaccctgtggaacggcaacaaaattatcgacgagcgcctgatcacccccgacggctccatgctgttccgagtaaccatcaacgtg

SEQ ID NO: 1202 - protein, 159 aa, Artificial Sequence
  Synthetic
MVFTLEDFVGDWEQTAAYNLDQVLEQGGVSSLFQNLAVSVTPIQRIVLSGENALKIDIHVIIPYEGLSADQMAQIEKIFKVVYPVDDHHFKVILHYGTLVIDGVTPNMINYFGRPYEGIAVFDGKKITVTGTLWNGNKIIDERLITPDGSMLFRVTINV

SEQ ID NO: 1203 - DNA, 477 bp, Artificial Sequence
  Synthetic
atggtcttcacactcgaagatttcgttggggactgggaacagacagccgcctacaacctggaccaagtccttgaacagggaggtgtgtccagtttgtttcagaatctcgccgtgtccgtaactccgatccaaaggattgtcctgagcggtgaaaatgccctgaagatcgacatccatgtcatcatcccgtatgaaggtctgagcgccgaccaaatggcccagatcgaaaaaatttttaaggtggtgtaccctgtggatgatcatcactttaaggtgatcctgcactatggcacactggtaatcgacggggttacgccgaacatgatcaactatttcggacggccgtatgaaggcatcgccgtgttcgacggcaaaaagatcactgtaacagggaccctgtggaacggcaacaaaattatcgacgagcgcctgatcacccccgacggctccatgctgttccgagtaaccatcaactgg

SEQ ID NO: 1204 - protein, 159 aa, Artificial Sequence
  Synthetic
MVFTLEDFVGDWEQTAAYNLDQVLEQGGVSSLFQNLAVSVTPIQRIVLSGENALKIDIHVIIPYEGLSADQMAQIEKIFKVVYPVDDHHFKVILHYGTLVIDGVTPNMINYFGRPYEGIAVFDGKKITVTGTLWNGNKIIDERLITPDGSMLFRVTINW

SEQ ID NO: 1205 - DNA, 477 bp, Artificial Sequence
  Synthetic
atggtcttcacactcgaagatttcgttggggactgggaacagacagccgcctacaacctggaccaagtccttgaacagggaggtgtgtccagtttgtttcagaatctcgccgtgtccgtaactccgatccaaaggattgtcctgagcggtgaaaatgccctgaagatcgacatccatgtcatcatcccgtatgaaggtctgagcgccgaccaaatggcccagatcgaaaaaatttttaaggtggtgtaccctgtggatgatcatcactttaaggtgatcctgcactatggcacactggtaatcgacggggttacgccgaacatgatcaactatttcggacggccgtatgaaggcatcgccgtgttcgacggcaaaaagatcactgtaacagggaccctgtggaacggcaacaaaattatcgacgagcgcctgatcacccccgacggctccatgctgttccgagtaaccatcaactac

SEQ ID NO: 1206 - protein, 159 aa, Artificial Sequence
  Synthetic
MVFTLEDFVGDWEQTAAYNLDQVLEQGGVSSLFQNLAVSVTPIQRIVLSGENALKIDIHVIIPYEGLSADQMAQIEKIFKVVYPVDDHHFKVILHYGTLVIDGVTPNMINYFGRPYEGIAVFDGKKITVTGTLWNGNKIIDERLITPDGSMLFRVTINY

SEQ ID NO: 1207 - DNA, 477 bp, Artificial Sequence
  Synthetic
atggtcttcacactcgaagatttcgttggggactgggaacagacagccgcctacaacctggaccaagtccttgaacagggaggtgtgtccagtttgtttcagaatctcgccgtgtccgtaactccgatccaaaggattgtcctgagcggtgaaaatgccctgaagatcgacatccatgtcatcatcccgtatgaaggtctgagcgccgaccaaatggcccagatcgaaaaaatttttaaggtggtgtaccctgtggatgatcatcactttaaggtgatcctgcactatggcacactggtaatcgacggggttacgccgaacatgctgaactatttcggacggccgtatgaaggcatcgccgtgttcgacggcaaaaagatcactgtaacagggaccctgtggaacggcaacaaaattatcgacgagcgcctgatcacccccgacggctccatgctgttccgagtaaccatcaacccc

SEQ ID NO: 1208 - protein, 159 aa, Artificial Sequence
  Synthetic
MVFTLEDFVGDWEQTAAYNLDQVLEQGGVSSLFQNLAVSVTPIQRIVLSGENALKIDIHVIIPYEGLSADQMAQIEKIFKVVYPVDDHHFKVILHYGTLVIDGVTPNMLNYFGRPYEGIAVFDGKKITVTGTLWNGNKIIDERLITPDGSMLFRVTINP

SEQ ID NO: 1209 - DNA, 477 bp, Artificial Sequence
  Synthetic
atggtcttcacactcgaagatttcgttggggactgggaacagacagccgcctacaacctggaccaagtccttgaacagggaggtgtgtccagtttgtttcagaatctcgccgtgtccgtaactccgatccaaaggattgtcctgagcggtgaaaatgccctgaagatcgacatccatgtcatcatcccgtatgaaggtctgagcgccgaccaaatggcccagatcgaagagatttttaaggtggtgtaccctgtggatgatcatcactttaaggtgatcctgcactatggcacactggtaatcgacggggttacgccgaacatgatcaactatttcggacggccgtatgaaggcatcgccgtgttcgacggcaaaaagatcactgtaacagggaccctgtggaacggcaacaaaattatcgacgagcgcctgatcacccccgacggctccatgctgttccgagtaaccatcaacccc

SEQ ID NO: 1210 - protein, 159 aa, Artificial Sequence
  Synthetic
MVFTLEDFVGDWEQTAAYNLDQVLEQGGVSSLFQNLAVSVTPIQRIVLSGENALKIDIHVIIPYEGLSADQMAQIEEIFKVVYPVDDHHFKVILHYGTLVIDGVTPNMINYFGRPYEGIAVFDGKKITVTGTLWNGNKIIDERLITPDGSMLFRVTINP

SEQ ID NO: 1211 - DNA, 477 bp, Artificial Sequence
  Synthetic
atggtcttcacactcgaagatttcgttggggactgggaacagacagccgcctacaacctggaccaagtccttgaacagggaggtgtgtccagtttgtttcagaatctcgccgtgtccgtaactccgatccaaaggattgtcctgagcggtgaaaatgccctgaagatcgacatccatgtcatcatcccgtatgaaggtctgagcgccgaccaaatggcccagatcgaaaaaatttttaaggtggtgtaccctgtggatgatcatcactttaaggtgatcctgcactatggcacactggtaatcgacggggttacgccgaacatgatcaactatttcggacggccgtatgaaggcatcgccgtgttcgacggcgagaagatcactgtaacagggaccctgtggaacggcaacaaaattatcgacgagcgcctgatcacccccgacggctccatgctgttccgagtaaccatcgacccc

SEQ ID NO: 1212 - protein, 159 aa, Artificial Sequence
  Synthetic
MVFTLEDFVGDWEQTAAYNLDQVLEQGGVSSLFQNLAVSVTPIQRIVLSGENALKIDIHVIIPYEGLSADQMAQIEKIFKVVYPVDDHHFKVILHYGTLVIDGVTPNMINYFGRPYEGIAVFDGEKITVTGTLWNGNKIIDERLITPDGSMLFRVTIDP

SEQ ID NO: 1213 - DNA, 477 bp, Artificial Sequence
  Synthetic
atggtcttcacactcgaagatttcgttggggactgggaacagacagccgcctacaacctggaccaagtccttgaacagggaggtgtgtccagtttgtttcagaatctcgccgtgtccgtaactccgatccaaaggattgtcctgagcggtgaaaatgccctgaagatcgacatccatgtcatcatcccgtatgaaggtctgagcgccgaccaaatggcccagatcgaaaaagtgtttaaggtggtgtaccctgtggatgatcatcactttaaggtgatcctgcactatggcacactggtaatcgacggggttacgccgaacatgatcaactatttcggacggccgtatgaaggcatcgccgtgttcgacggcaaaaagatcactgtaacagggaccctgtggaacggcaacaaaattatcgacgagcgcctgatcacccccgacggctccatgctgttccgagtaaccatcaacccc

SEQ ID NO: 1214 - protein, 159 aa, Artificial Sequence
  Synthetic
MVFTLEDFVGDWEQTAAYNLDQVLEQGGVSSLFQNLAVSVTPIQRIVLSGENALKIDIHVIIPYEGLSADQMAQIEKVFKVVYPVDDHHFKVILHYGTLVIDGVTPNMINYFGRPYEGIAVFDGKKITVTGTLWNGNKIIDERLITPDGSMLFRVTINP

SEQ ID NO: 1215 - DNA, 477 bp, Artificial Sequence
  Synthetic
atggtcttcacactcgaagatttcgttggggactgggaacagacagccgcctacaacctggaccaagtccttgaacagggaggtgtgtccagtttgtttcagaatctcgccgtgtccgtaactccgatccaaaggattgtcctgagcgacgaaaatgccctgaagatcgacatccgggtcatcatcccgtatgaaggtctgagcgccgaccaaatggcccagatcgaaaaaatttttaaggtggtgtaccctgtggatgatcatcactttaaggtgatcatgcactatggcacactggtagtggacggggttacgccgaacatgatcaactatttcggacggccgtatgaaggcatcgccgtgttcgacggcaaaaagatcactgtaacagggaccctgtggaacggcaacaaaattatcgacgagcgcctgatcacccccgacggctccatgctgttccgagtaaccatcaacccc

SEQ ID NO: 1216 - protein, 159 aa, Artificial Sequence
  Synthetic
MVFTLEDFVGDWEQTAAYNLDQVLEQGGVSSLFQNLAVSVTPIQRIVLSDENALKIDIRVIIPYEGLSADQMAQIEKIFKVVYPVDDHHFKVIMHYGTLVVDGVTPNMINYFGRPYEGIAVFDGKKITVTGTLWNGNKIIDERLITPDGSMLFRVTINP

SEQ ID NO: 1217 - DNA, 477 bp, Artificial Sequence
  Synthetic
atggtcttcacactcgaagatttcgttggggactgggaacagacagccgcctacaacctggaccaagtccttgaacagggaggtgtgtccagtttgctgcagaatctcgccgcctccgtaactccgatccaaaggattgtcctgagcggtgaaaatgccctgaagatcgacatccatgtcatcatcccgtatgaaggtctgagcgccgaccaaatggcccagatcgaaaaaatttttaaggtggtgtaccctgtggatgatcatcactttaaggtgatcctgcactatggcacactggtagtggacggggttacgccgaacatgatcaactatttcggacggccgtatgaaggcatcgccgtgttcgacggcaaaaagatcactgtaacagggaccctgtggaacggcaacaaaattatcgacgagcgcctgatcacccccgacggctccatgctgttccgagtaaccatcaacccc

SEQ ID NO: 1218 - protein, 159 aa, Artificial Sequence
  Synthetic
MVFTLEDFVGDWEQTAAYNLDQVLEQGGVSSLLQNLAASVTPIQRIVLSGENALKIDIHVIIPYEGLSADQMAQIEKIFKVVYPVDDHHFKVILHYGTLVVDGVTPNMINYFGRPYEGIAVFDGKKITVTGTLWNGNKIIDERLITPDGSMLFRVTINP

SEQ ID NO: 1219 - DNA, 477 bp, Artificial Sequence
  Synthetic
atggtcttcacactcgaagatttcgttggggactgggaacagacagccgcctacaacctggaccaagtccttgaacagggaggtgtgtccagtttgctgcagaatctcgccgtgtccgtaactccgatccaaaggattgtcctgagcggtgaaaatgccctgaagatcgacatccatgtcatcatcccgtatgaaggtctgagcgccgaccaaatggcccagatcgaaaaaatttttaaggtggtgtaccctgtggatgatcatcactttaaggtgatcctgccctatggcacactggtaatcgacggggttacgccgaacatgatcaactatttcggacggccgtatgaaggcatcgccgtgttcgacggcaaaaagatcactgtaacagggaccctgtggaacggcaacaaaattatcgacgagcgcctgatcacccccgacggctccatgctgttccgagtaaccatcaacccc

SEQ ID NO: 1220 - protein, 159 aa, Artificial Sequence
  Synthetic
MVFTLEDFVGDWEQTAAYNLDQVLEQGGVSSLLQNLAVSVTPIQRIVLSGENALKIDIHVIIPYEGLSADQMAQIEKIFKVVYPVDDHHFKVILPYGTLVIDGVTPNMINYFGRPYEGIAVFDGKKITVTGTLWNGNKIIDERLITPDGSMLFRVTINP

SEQ ID NO: 1221 - DNA, 477 bp, Artificial Sequence
  Synthetic
atggtcttcacactcgaagatttcgttggggactgggaacagacagccgcctacaacctggaccaagtccttgaacagggaggtgtgtccagtttgtttcagaatctcgccgtgtccgtaactccgatccaaaggattgtcctgagcggtgaaaatgccctgaagatcgacatccatgtcatcatcccgtatgaaggtctgagcgccgaccaaatggcccagatcgaaaaaatttttaaggtggtgtaccctgtggatgatcatcactttaaggccatcctgcactatggcacactggtaatcgacggggttacgccgaacatgatcaactatttcggacggccgtatgaaggcatcgccgtgttcgacggcaaaaagatcactgtaacagggaccctgtggaacggcaacaaaattatcgacgagcgcctgatcacccccgacggctccatgctgttccgagtaaccatcaacccc

SEQ ID NO: 1222 - protein, 159 aa, Artificial Sequence
  Synthetic
MVFTLEDFVGDWEQTAAYNLDQVLEQGGVSSLFQNLAVSVTPIQRIVLSGENALKIDIHVIIPYEGLSADQMAQIEKIFKVVYPVDDHHFKAILHYGTLVIDGVTPNMINYFGRPYEGIAVFDGKKITVTGTLWNGNKIIDERLITPDGSMLFRVTINP

SEQ ID NO: 1223 - DNA, 477 bp, Artificial Sequence
  Synthetic
atggtcttcacactcgaagatttcgttggggactgggaacagacagccgcctacaacctggaccaagtccttgaacagggaggtgtgtccagtttgtttcagaatctcgccgtgtccgtaactccgatccaaagggtggtcctgagcggtgaaaatgccctgaagatcgacatccatgtcatcatcccgtatgaaggtctgagcgccgaccaaatggcccagatcgaaaaaatttttaaggtggtgtaccctgtggatgatcatcactttaaggtgatcctgcactatggcacactggtaatcgacggggttacgccgaacatgatcaactatttcggacggccgtatgaaggcatcgccgtgttcgacggcaaaaagatcactgtaacagggaccctgtggaacggcaacaaaattatcgacgagcgcctgatcacccccgacggctccatgctgttccgagtaaccatcaacccc

SEQ ID NO: 1224 - protein, 159 aa, Artificial Sequence
  Synthetic
MVFTLEDFVGDWEQTAAYNLDQVLEQGGVSSLFQNLAVSVTPIQRVVLSGENALKIDIHVIIPYEGLSADQMAQIEKIFKVVYPVDDHHFKVILHYGTLVIDGVTPNMINYFGRPYEGIAVFDGKKITVTGTLWNGNKIIDERLITPDGSMLFRVTINP

SEQ ID NO: 1225 - DNA, 477 bp, Artificial Sequence
  Synthetic
atggtcttcacactcgaagatttcgttggggactgggaacagacagccgcctacaacctggaccaagtccttgaacagggaggtgtgtccagtttgtttcagaatctcgccgtgtccgtaactccgatccaaaggattgtccggagcggtgaaaatgccctgaagatcgacatccatgtcatcatcccgtatgaaggtctgagcgccgaccaaatggcccagatcgaaaaaatttttaaggtggtgtaccctgtggatgatcagcactttaaggtgatcctgcactatggcacactggtaatcgacggggttacgccgaacgtgatcaactatttcggacggccgtatgaaggcatcgccgtgttcgacggcaaaaagatcactgtaacagggaccctgtggaacggcaacaaaattatcgacgagcgcctgatcacccccgacggctccatgctgttccgagtaaccatcaacccc

SEQ ID NO: 1226 - protein, 159 aa, Artificial Sequence
  Synthetic
MVFTLEDFVGDWEQTAAYNLDQVLEQGGVSSLFQNLAVSVTPIQRIVRSGENALKIDIHVIIPYEGLSADQMAQIEKIFKVVYPVDDQHFKVILHYGTLVIDGVTPNVINYFGRPYEGIAVFDGKKITVTGTLWNGNKIIDERLITPDGSMLFRVTINP

SEQ ID NO: 1227 - DNA, 477 bp, Artificial Sequence
  Synthetic
atggtcttcacactcgaagatttcgttggggactgggaacagacagccgcctacaacctggaccaagtccttgaacagggaggtgtgtccagtttgtttcagaatctcgccgtgtccgtaactccgatccaaaggattgtcctgagcggtgaaaatgccctgaagatcgacatccatgtcatcatcccgtatgaaggtctgagcgccgaccaaatggcccagatcgaaaaaatttttaaggtggtgtaccctgtggatgatcatcactttaaggtgatcctgcactatggcacactggtaatcgacggggttacgccgaacatgatcaactatttcggacggccgtatgaaggcatcgccgtgttcgacggcaaaaagatcactgtaacagggaccctgtggaacggcaacaaaattatcgacgagcacctgatcacccccgacggctccatgctgttccgagtaaccatcaacccc

SEQ ID NO: 1228 - protein, 159 aa, Artificial Sequence
  Synthetic
MVFTLEDFVGDWEQTAAYNLDQVLEQGGVSSLFQNLAVSVTPIQRIVLSGENALKIDIHVIIPYEGLSADQMAQIEKIFKVVYPVDDHHFKVILHYGTLVIDGVTPNMINYFGRPYEGIAVFDGKKITVTGTLWNGNKIIDEHLITPDGSMLFRVTINP

SEQ ID NO: 1229 - DNA, 477 bp, Artificial Sequence
  Synthetic
atggtcttcacactcgaagatttcgttggggactgggaacagacagccgcctacaacctggaccaagtccttgaacagggaggtgtgtccagtttgtttcaggacctcgccgtgtccgtaactccgatccaaaggattgtcctgagcggtgaaaatgccctgaagatcgacatccatgccatcatcccgtatgaaggtctgagcgccgaccaaatggcccagatcgaaaaaatttttaaggtggtgtaccctgtggatgatcatcactttaaggtgatcctgcactatggcacactggtaatcgacggggttacgccgaacatgatcaactatttcggacggccgtatgaaggcatcgccgtgttcgacggcaaaaagatcactgtaacagggaccctgtggaacggcaacaaaattatcgacgagcgcctgatcacccccgacggctccatgctgttccgagtaaccatcaacccc

SEQ ID NO: 1230 - protein, 159 aa, Artificial Sequence
  Synthetic
MVFTLEDFVGDWEQTAAYNLDQVLEQGGVSSLFQDLAVSVTPIQRIVLSGENALKIDIHAIIPYEGLSADQMAQIEKIFKVVYPVDDHHFKVILHYGTLVIDGVTPNMINYFGRPYEGIAVFDGKKITVTGTLWNGNKIIDERLITPDGSMLFRVTINP

SEQ ID NO: 1231 - DNA, 477 bp, Artificial Sequence
  Synthetic
atggtcttcacactcgaagatttcgttggggactgggaacagacagccgcctacaacctggaccaagtccttgaacagggaggtgtgtccagtttgtttcagaatctcgccgtgtccgtaactccgatccaaaggattgtcctgagcggtgaaaatgccctgaagatcgacaaccatgtcatcatcccgtatgaaggtctgagcgccgaccaaatggcccagatcgaaaaaatttttaaggtggtgtaccctgtggatgatcatcactttaaggtgatcctgcactatggcacactggtaatcgacggggttacgccgaacatgatcaactatttcggacggccgtatgaaggcatcgccgtgttcgacggcaaaaagatcactgtaacagggaccctgtggaacggccacaaaattatcgacgagcgcctgatcacccccgacggctccatgctgttccgagtaaccatcaacccc

SEQ ID NO: 1232 - protein, 159 aa, Artificial Sequence
  Synthetic
MVFTLEDFVGDWEQTAAYNLDQVLEQGGVSSLFQNLAVSVTPIQRIVLSGENALKIDNHVIIPYEGLSADQMAQIEKIFKVVYPVDDHHFKVILHYGTLVIDGVTPNMINYFGRPYEGIAVFDGKKITVTGTLWNGHKIIDERLITPDGSMLFRVTINP

SEQ ID NO: 1233 - DNA, 477 bp, Artificial Sequence
  Synthetic
atggtcttcacactcgaagatttcgttggggactgggaacagacagccgcctacaacctggaccaagtccttgaacagggaggtgtgtccagtttgtttcagaatctcgccgtgtccgtaactccgatccaaaggattgtccagagcggtgaaaatgccctgaagatcgacatccatgtcatcatcccgtatgaaggtctgagcgccgaccaaatggcccagatcgaaaaaatttttaaggtggtgtaccctgtggatgatcatcactttaaggtgatcctgcactatggcacactggtaatcgacggggttacgccgaacatgatcaactatttcggacggccgtatgaaggcatcgccgtgttcgacggcaaaaagatcactgtaacagggaccctgtggaacggcaacaaaattatcgacgagcgcctgatcacccccgacggctccatgctgttccgagtaaccatcaaccac

SEQ ID NO: 1234 - protein, 159 aa, Artificial Sequence
  Synthetic
MVFTLEDFVGDWEQTAAYNLDQVLEQGGVSSLFQNLAVSVTPIQRIVQSGENALKIDIHVIIPYEGLSADQMAQIEKIFKVVYPVDDHHFKVILHYGTLVIDGVTPNMINYFGRPYEGIAVFDGKKITVTGTLWNGNKIIDERLITPDGSMLFRVTINH

SEQ ID NO: 1235 - DNA, 477 bp, Artificial Sequence
  Synthetic
atggtcttcacactcgaagatttcgttggggactgggaacagacagccgcctacaacctggaccaagtccttgaacagggaggtgtgtccagtttgtttcagaatctcgccgtgtccgtaactccgatccaaaggattgtcctgagcggtgaaaatgccctgaagatcgacatccatgtcatcgtgccgtatgaaggtctgagcgccgaccaaatggcccagatcgaaaaaatttttaaggtggtgtaccctgtggatgatcatcactttaaggtgatcctgcactatggcacactggtaatcgacggggttacgccgaacatgatcaactatttcggacggccgtatgaaggcatcgccgtgttcgacggcaaaaagatcactgtaacagggaccctgtggaacggcaacaaaattatcgacgagcgcctgatcacccccgacggctccatgctgttccgagtaaccatcaacccc

SEQ ID NO: 1236 - protein, 159 aa, Artificial Sequence
  Synthetic
MVFTLEDFVGDWEQTAAYNLDQVLEQGGVSSLFQNLAVSVTPIQRIVLSGENALKIDIHVIVPYEGLSADQMAQIEKIFKVVYPVDDHHFKVILHYGTLVIDGVTPNMINYFGRPYEGIAVFDGKKITVTGTLWNGNKIIDERLITPDGSMLFRVTINP

SEQ ID NO: 1237 - DNA, 477 bp, Artificial Sequence
  Synthetic
atggtcttcacactcgaagatttcgttggggactgggaacagacagccgcctacaacctggaccaagtccttgaacagggaggtgtgtccagtttgtttcagaatctcgccgtgtccgtaactccgatccaaaggattgtcctgagcggtgaaaataccctgaagatcgacatccatgtcatcatcccgtatgaaggtctgagcgccgaccaaatggcccagatcaaaaaaatttttaaggtggtgtaccctgtggatgatcatcactttaaggtgatcctgcactatggcacactggtaatcgacggggttacgccgaacatgatcaactatttcggacggctgtatgaaggcatcgccgtgttcgacggcaaaaagatcactgtaacagggaccctgtggaacggcaacaaaattatcgacgagcgcctgatcacccccgacggctccatgctgttccgagtaaccatcaacccc

SEQ ID NO: 1238 - protein, 159 aa, Artificial Sequence
  Synthetic
MVFTLEDFVGDWEQTAAYNLDQVLEQGGVSSLFQNLAVSVTPIQRIVLSGENTLKIDIHVIIPYEGLSADQMAQIKKIFKVVYPVDDHHFKVILHYGTLVIDGVTPNMINYFGRLYEGIAVFDGKKITVTGTLWNGNKIIDERLITPDGSMLFRVTINP

SEQ ID NO: 1239 - DNA, 477 bp, Artificial Sequence
  Synthetic
atggtcttcacactcgaagatttcgttggggactgggaacagacagccgcctacaacctggaccaagtccttgaacagggaggtgtgtccagtttgtttcagaatctcgccgcctccgtaactccgatccaaaggattgtcctgagcggtgaaaatgccctgaagatcgacatccatgtcatcatcccgtatgaaggtctgagcgccgaccaaatggcccagatcgaaaaaatttttaaggtggtgtaccctgtggatgatcatcactttaaggtgatcctgcactatggcacactggtaatcgacggggttacgccgaacatgatcaactatttcggacggccgtatgaaggcatcgccgtgttcgacggcaaaaagatcactgtaacagggaccctgtggaacggcaacaaaattatcgacgagcgcctgatcacccccgacggctccatgctgttccgagtaaccatcaacccc

SEQ ID NO: 1240 - protein, 159 aa, Artificial Sequence
  Synthetic
MVFTLEDFVGDWEQTAAYNLDQVLEQGGVSSLFQNLAASVTPIQRIVLSGENALKIDIHVIIPYEGLSADQMAQIEKIFKVVYPVDDHHFKVILHYGTLVIDGVTPNMINYFGRPYEGIAVFDGKKITVTGTLWNGNKIIDERLITPDGSMLFRVTINP

SEQ ID NO: 1241 - DNA, 477 bp, Artificial Sequence
  Synthetic
atggtcttcacactcgaagatttcgttggggactgggaacagacagccgcctacaacctggaccaagtccttgaacagggaggtgtgtccagtttgtttcagaatctcgccgtgtccgtaactccgatccaaaggattgtcctgagcggtgaaaataccctgaagatcgacatccatgtcatcatcccgtatgaaggtctgagcgccgaccaaatggcccagatcgaaaaaatttttaaggtggtgtaccctgtggatgatcatcactttaaggtgatcctgcactatggcacactggtaatcgacggggttacgccgaacatgatcaactatttcggacggccgtatgaaggcatcgccgtgttcgacggcaaaaagatcactgtaacagggaccctgtggaacggcaacaaaattatcgacgagcgcctgatcacccccgacggctccatgctgttccgagtaaccatcaacccc

SEQ ID NO: 1242 - protein, 159 aa, Artificial Sequence
  Synthetic
MVFTLEDFVGDWEQTAAYNLDQVLEQGGVSSLFQNLAVSVTPIQRIVLSGENTLKIDIHVIIPYEGLSADQMAQIEKIFKVVYPVDDHHFKVILHYGTLVIDGVTPNMINYFGRPYEGIAVFDGKKITVTGTLWNGNKIIDERLITPDGSMLFRVTINP

SEQ ID NO: 1243 - DNA, 477 bp, Artificial Sequence
  Synthetic
atggtcttcacactcgaagatttcgttggggactgggaacagacagccgcctacaacctggaccaagtccttgaacagggaggtgtgtccagtttgtttcagaatctcgccgtgtccgtaactccgatccaaaggattgtcctgagcggtgaaaatgccctgaagatcgacatccgggtcatcatcccgtatgaaggtctgagcgccgaccaaatggcccagatcgaaaaaatttttaaggtggtgtaccctgtggatgatcatcactttaaggtgatcctgcactatggcacactggtaatcgacggggttacgccgaacatgatcaactatttcggacggccgtatgaaggcatcgccgtgttcgacggcaaaaagatcactgtaacagggaccctgtggaacggcaacaaaattatcgacgagcgcctgatcacccccgacggctccatgctgttccgagtaaccatcaacccc

SEQ ID NO: 1244 - protein, 159 aa, Artificial Sequence
  Synthetic
MVFTLEDFVGDWEQTAAYNLDQVLEQGGVSSLFQNLAVSVTPIQRIVLSGENALKIDIRVIIPYEGLSADQMAQIEKIFKVVYPVDDHHFKVILHYGTLVIDGVTPNMINYFGRPYEGIAVFDGKKITVTGTLWNGNKIIDERLITPDGSMLFRVTINP

SEQ ID NO: 1245 - DNA, 477 bp, Artificial Sequence
  Synthetic
atggtcttcacactcgaagatttcgttggggactgggaacagacagccgcctacaacctggaccaagtccttgaacagggaggtgtgtccagtttgtttcagaatctcgccgtgtccgtaactccgatccaaaggattgtcctgagcggtgaaaatgccctgaagatcgacatccatgccatcatcccgtatgaaggtctgagcgccgaccaaatggcccagatcgaaaaaatttttaaggtggtgtaccctgtggatgatcatcactttaaggtgatcctgcactatggcacactggtaatcgacggggttacgccgaacatgatcaactatttcggacggccgtatgaaggcatcgccgtgttcgacggcaaaaagatcactgtaacagggaccctgtggaacggcaacaaaattatcgacgagcgcctgatcacccccgacggctccatgctgttccgagtaaccatcaacccc

SEQ ID NO: 1246 - protein, 159 aa, Artificial Sequence
  Synthetic
MVFTLEDFVGDWEQTAAYNLDQVLEQGGVSSLFQNLAVSVTPIQRIVLSGENALKIDIHAIIPYEGLSADQMAQIEKIFKVVYPVDDHHFKVILHYGTLVIDGVTPNMINYFGRPYEGIAVFDGKKITVTGTLWNGNKIIDERLITPDGSMLFRVTINP

SEQ ID NO: 1247 - DNA, 477 bp, Artificial Sequence
  Synthetic
atggtcttcacactcgaagatttcgttggggactgggaacagacagccgcctacaacctggaccaagtccttgaacagggaggtgtgtccagtttgtttcagaatctcgccgtgtccgtaactccgatccaaaggattgtcctgagcggtgaaaatgccctgaagatcgacatccatgtcatcatcccgtatgaaggtctgagcgccgaccaaatggcccagatcaagaaaatttttaaggtggtgtaccctgtggatgatcatcactttaaggtgatcctgcactatggcacactggtaatcgacggggttacgccgaacatgatcaactatttcggacggccgtatgaaggcatcgccgtgttcgacggcaaaaagatcactgtaacagggaccctgtggaacggcaacaaaattatcgacgagcgcctgatcacccccgacggctccatgctgttccgagtaaccatcaacccc

SEQ ID NO: 1248 - protein, 159 aa, Artificial Sequence
  Synthetic
MVFTLEDFVGDWEQTAAYNLDQVLEQGGVSSLFQNLAVSVTPIQRIVLSGENALKIDIHVIIPYEGLSADQMAQIKKIFKVVYPVDDHHFKVILHYGTLVIDGVTPNMINYFGRPYEGIAVFDGKKITVTGTLWNGNKIIDERLITPDGSMLFRVTINP

SEQ ID NO: 1249 - DNA, 477 bp, Artificial Sequence
  Synthetic
atggtcttcacactcgaagatttcgttggggactgggaacagacagccgcctacaacctggaccaagtccttgaacagggaggtgtgtccagtttgtttcagaatctcgccgtgtccgtaactccgatccaaaggattgtcctgagcggtgaaaatgccctgaagatcgacatccatgtcatcatcccgtatgaaggtctgagcgccgaccaaatggcccagatcgaaaaaatttttaaggtggtgtaccctgtggatgatcagcactttaaggtgatcctgcactatggcacactggtaatcgacggggttacgccgaacatgatcaactatttcggacggccgtatgaaggcatcgccgtgttcgacggcaaaaagatcactgtaacagggaccctgtggaacggcaacaaaattatcgacgagcgcctgatcacccccgacggctccatgctgttccgagtaaccatcaacccc

SEQ ID NO: 1250 - protein, 159 aa, Artificial Sequence
  Synthetic
MVFTLEDFVGDWEQTAAYNLDQVLEQGGVSSLFQNLAVSVTPIQRIVLSGENALKIDIHVIIPYEGLSADQMAQIEKIFKVVYPVDDQHFKVILHYGTLVIDGVTPNMINYFGRPYEGIAVFDGKKITVTGTLWNGNKIIDERLITPDGSMLFRVTINP

SEQ ID NO: 1251 - DNA, 477 bp, Artificial Sequence
  Synthetic
atggtcttcacactcgaagatttcgttggggactgggaacagacagccgcctacaacctggaccaagtccttgaacagggaggtgtgtccagtttgtttcagaatctcgccgtgtccgtaactccgatccaaaggattgtcctgagcggtgaaaatgccctgaagatcgacatccatgtcatcatcccgtatgaaggtctgagcgccgaccaaatggcccagatcgaaaaaatttttaaggtggtgtaccctgtggatgatcatcactttaaggtgatcctgccctatggcacactggtaatcgacggggttacgccgaacatgatcaactatttcggacggccgtatgaaggcatcgccgtgttcgacggcaaaaagatcactgtaacagggaccctgtggaacggcaacaaaattatcgacgagcgcctgatcacccccgacggctccatgctgttccgagtaaccatcaacccc

SEQ ID NO: 1252 - protein, 159 aa, Artificial Sequence
  Synthetic
MVFTLEDFVGDWEQTAAYNLDQVLEQGGVSSLFQNLAVSVTPIQRIVLSGENALKIDIHVIIPYEGLSADQMAQIEKIFKVVYPVDDHHFKVILPYGTLVIDGVTPNMINYFGRPYEGIAVFDGKKITVTGTLWNGNKIIDERLITPDGSMLFRVTINP

SEQ ID NO: 1253 - DNA, 477 bp, Artificial Sequence
  Synthetic
atggtcttcacactcgaagatttcgttggggactgggaacagacagccgcctacaacctggaccaagtccttgaacagggaggtgtgtccagtttgtttcagaatctcgccgtgtccgtaactccgatccaaaggattgtcctgagcggtgaaaatgccctgaagatcgacatccatgtcatcatcccgtatgaaggtctgagcgccgaccaaatggcccagatcgaaaaaatttttaaggtggtgtaccctgtggatgatcatcactttaaggtgatcctgcactatggcacactggtaatcgacggggttacgccgaacatgatcaactatttcggacggccgtatgaaggcatcgccgtgttcgacggcgagaagatcactgtaacagggaccctgtggaacggcaacaaaattatcgacgagcgcctgatcacccccgacggctccatgctgttccgagtaaccatcaacccc

SEQ ID NO: 1254 - protein, 159 aa, Artificial Sequence
  Synthetic
MVFTLEDFVGDWEQTAAYNLDQVLEQGGVSSLFQNLAVSVTPIQRIVLSGENALKIDIHVIIPYEGLSADQMAQIEKIFKVVYPVDDHHFKVILHYGTLVIDGVTPNMINYFGRPYEGIAVFDGEKITVTGTLWNGNKIIDERLITPDGSMLFRVTINP

SEQ ID NO: 1255 - DNA, 477 bp, Artificial Sequence
  Synthetic
atggtcttcacactcgaagatttcgttggggactgggaacagacagccgcctacaacctggaccaagtccttgaacagggaggtgtgtccagtttgtttcagaatctcgccgtgtccgtaactccgatccaaaggattgtcctgagcggtgaaaatgccctgaagatcgacatccatgtcatcatcccgtatgaaggtctgagcgccgaccaaatggcccagatcgaaaaaatttttaaggtggtgtaccctgtggatgatcatcactttaaggtgatcctgcactatggcacactggtaatcgacggggttacgccgaacatgatcaactatttcggacggccgtatgaaggcatcgccgtgttcgacggcaaaaagatcactgtaagcgggaccctgtggaacggcaacaaaattatcgacgagcgcctgatcacccccgacggctccatgctgttccgagtaaccatcaacccc

SEQ ID NO: 1256 - protein, 159 aa, Artificial Sequence
  Synthetic
MVFTLEDFVGDWEQTAAYNLDQVLEQGGVSSLFQNLAVSVTPIQRIVLSGENALKIDIHVIIPYEGLSADQMAQIEKIFKVVYPVDDHHFKVILHYGTLVIDGVTPNMINYFGRPYEGIAVFDGKKITVSGTLWNGNKIIDERLITPDGSMLFRVTINP

SEQ ID NO: 1257 - DNA, 477 bp, Artificial Sequence
  Synthetic
atggtcttcacactcgaagatttcgttggggactgggaacagacagccgcctacaacctggaccaagtccttgaacagggaggtgtgtccagtttgtttcagaatctcgccgtgtccgtaactccgatccaaaggattgtcctgagcggtgaaaatgccctgaagatcgacatccatgtcatcatcccgtatgaaggtctgagcgccgaccaaatggcccagatcgaaaaaatttttaaggtggtgtaccctgtggatgatcatcactttaaggtgatcctgcactatggcacactggtaatcgacggggttacgccgaacatgatcaactatttcggacggccgtatgaaggcatcgccgtgttcgacggcaaaaagatcactgtaacagggaccctgtggaacggcaacaaaattatcgacgagcgccagatcacccccgacggctccatgctgttccgagtaaacatcaacccc

SEQ ID NO: 1258 - protein, 159 aa, Artificial Sequence
  Synthetic
MVFTLEDFVGDWEQTAAYNLDQVLEQGGVSSLFQNLAVSVTPIQRIVLSGENALKIDIHVIIPYEGLSADQMAQIEKIFKVVYPVDDHHFKVILHYGTLVIDGVTPNMINYFGRPYEGIAVFDGKKITVTGTLWNGNKIIDERQITPDGSMLFRVNINP

SEQ ID NO: 1259 - DNA, 477 bp, Artificial Sequence
  Synthetic
atggtcttcacactcgaagatttcgttggggactgggaacagacagccgcctacaacctggaccaagtccttgaacagggaggtgtgtccagtttgtttcagaatctcgccgtgtccgtaactccgatccaaaggattgtcctgagcggtgaaaatgccctgaagatcgacatccatgtcatcatcccgtatgaaggtctgagcgccgaccaaatggcccagatcgaaaaaatttttaaggtggtgtaccctgtggatgatcatcactttaaggtgatcctgcactatggcacactggtaatcgacggggttacgccgaacatgatcaactatttcggacggccgtatgaaggcatcgccgtgttcgacggcaaaaagatcactgtaacagggaccctgtggaacggcaacaaaattatcgacgagcgcctgatcacccccgacggctccatgctgttccgagtaaccatcgacccc

SEQ ID NO: 1260 - protein, 159 aa, Artificial Sequence
  Synthetic
MVFTLEDFVGDWEQTAAYNLDQVLEQGGVSSLFQNLAVSVTPIQRIVLSGENALKIDIHVIIPYEGLSADQMAQIEKIFKVVYPVDDHHFKVILHYGTLVIDGVTPNMINYFGRPYEGIAVFDGKKITVTGTLWNGNKIIDERLITPDGSMLFRVTIDP

SEQ ID NO: 1261 - DNA, 477 bp, Artificial Sequence
  Synthetic
atggtcttcacactcgaagatttcgttggggactgggaacagacagccgcctacaacctggaccaagtccttgaacagggaggtgtgtccagtttgtttcagaatctcgccgtgtccgtaactccgatccaaaggattgtcctgagcggtgaaaatgccctgaagatcgacatccaggtcatcatcccgtatgaaggtctgagcgccgaccaaatggcccagatcgaaaaaatttttaaggtggtgtaccctgtggatgatcatcactttaaggtgatcctgcactatggcacactggtaatcgacggggttacgccgaacatgatcaactatttcggacggccgtatgaaggcatcgccgtgttcgacggcaaaaagatcactgtaacagggaccctgtggaacggcaacaaaattatcgacgagcgcctgatcacccccgacggctccatgctgttccgagtaaccatcaacccc

SEQ ID NO: 1262 - protein, 159 aa, Artificial Sequence
  Synthetic
MVFTLEDFVGDWEQTAAYNLDQVLEQGGVSSLFQNLAVSVTPIQRIVLSGENALKIDIQVIIPYEGLSADQMAQIEKIFKVVYPVDDHHFKVILHYGTLVIDGVTPNMINYFGRPYEGIAVFDGKKITVTGTLWNGNKIIDERLITPDGSMLFRVTINP

SEQ ID NO: 1263 - DNA, 477 bp, Artificial Sequence
  Synthetic
atggtcttcacactcgaagatttcgttggggactgggaacagacagccgcctacaacctggaccaagtccttgaacagggaggtgtgtccagtttgtttcagaatctcgccgtgtccgtaactccgatccaaaggattgtcctgagcggtgaaaatgccctgaagatcgacatccatgtcatcatcccgtatgaaggtctgagcgccgaccaaatggcccagatcgaaaaaatttttaaggtggtgtaccctgtggatgatcatcactttaaggtgatcatgcactatggcacactggtaatcgacggggttacgccgaacatgatcaactatttcggacggccgtatgaaggcatcgccgtgttcgacggcaaaaagatcactgtaacagggaccctgtggaacggcaacaaaattatcgacgagcgcctgatcacccccgacggctccatgctgttccgagtaaccatcaacccc

SEQ ID NO: 1264 - protein, 159 aa, Artificial Sequence
  Synthetic
MVFTLEDFVGDWEQTAAYNLDQVLEQGGVSSLFQNLAVSVTPIQRIVLSGENALKIDIHVIIPYEGLSADQMAQIEKIFKVVYPVDDHHFKVIMHYGTLVIDGVTPNMINYFGRPYEGIAVFDGKKITVTGTLWNGNKIIDERLITPDGSMLFRVTINP

SEQ ID NO: 1265 - DNA, 477 bp, Artificial Sequence
  Synthetic
atggtcttcacactcgaagatttcgttggggactgggaacagacagccgcctacaacctggaccaagtccttgaacagggaggtgtgtccagtttgtttcagaatctcgccgtgtccgtaactccgatccaaaggattgtcctgagcggtgaaaatgccctgaagatcgacatccatgtcatcatcccgtatgaaggtctgagcgccgaccaaatggcccagatcgaaaaaatttttaaggtggtgtaccctgtggatgatcatcactttaaggtgatcctgcactatggcacactggtaatcgacggggttacgccgaacatgatcaactatttcggacggctgtatgaaggcatcgccgtgttcgacggcaaaaagatcactgtaacagggaccctgtggaacggcaacaaaattatcgacgagcgcctgatcacccccgacggctccatgctgttccgagtaaccatcaacccc

SEQ ID NO: 1266 - protein, 159 aa, Artificial Sequence
  Synthetic
MVFTLEDFVGDWEQTAAYNLDQVLEQGGVSSLFQNLAVSVTPIQRIVLSGENALKIDIHVIIPYEGLSADQMAQIEKIFKVVYPVDDHHFKVILHYGTLVIDGVTPNMINYFGRLYEGIAVFDGKKITVTGTLWNGNKIIDERLITPDGSMLFRVTINP

SEQ ID NO: 1267 - DNA, 477 bp, Artificial Sequence
  Synthetic
atggtcttcacactcgaagatttcgttggggactgggaacagacagccgcctacaacctggaccaagtccttgaacagggaggtgtgtccagtttgtttcagaatctcgccgtgtccgtaactccgatccaaaggattgtcctgagcgacgaaaatgccctgaagatcgacatccatgtcatcatcccgtatgaaggtctgagcgccgaccaaatggcccagatcgaaaaaatttttaaggtggtgtaccctgtggatgatcatcactttaaggtgatcctgcactatggcacactggtaatcgacggggttacgccgaacatgatcaactatttcggacggccgtatgaaggcatcgccgtgttcgacggcaaaaagatcactgtaacagggaccctgtggaacggcaacaaaattatcgacgagcgcctgatcacccccgacggctccatgctgttccgagtaaccatcaacccc

SEQ ID NO: 1268 - protein, 159 aa, Artificial Sequence
  Synthetic
MVFTLEDFVGDWEQTAAYNLDQVLEQGGVSSLFQNLAVSVTPIQRIVLSDENALKIDIHVIIPYEGLSADQMAQIEKIFKVVYPVDDHHFKVILHYGTLVIDGVTPNMINYFGRPYEGIAVFDGKKITVTGTLWNGNKIIDERLITPDGSMLFRVTINP

SEQ ID NO: 1269 - DNA, 444 bp, Artificial Sequence
  Synthetic
atggtcttcacactcgaagatttcgttggggactgggaacagacagccgcctacaacctggaccaagtccttgaacagggaggtgtgtccagtttgtttcagaatctcgccgtgtccgtaactccgatccaaaggattgtcctgagcggtgaaaatgccctgaagatcgacatccatgtcatcatcccgtatgaaggtctgagcgccgaccaaatggcccagatcgaaaaaatttttaaggtggtgtaccctgtggatgatcatcactttaaggtgatcctgcactatggcacactggtaatcgacggggttacgccgaacatgatcaactatttcggacggccgtatgaaggcatcgccgtgttcgacggcaaaaagatcactgtaacagggaccctgtggaacggcaacaaaattatcgacgagcgcctgatcacccccgac

SEQ ID NO: 1270 - protein, 148 aa, Artificial Sequence
  Synthetic
MVFTLEDFVGDWEQTAAYNLDQVLEQGGVSSLFQNLAVSVTPIQRIVLSGENALKIDIHVIIPYEGLSADQMAQIEKIFKVVYPVDDHHFKVILHYGTLVIDGVTPNMINYFGRPYEGIAVFDGKKITVTGTLWNGNKIIDERLITPD

SEQ ID NO: 1271 - DNA, 477 bp, Artificial Sequence
  Synthetic
atggtcttcacactcgaagatttcgttggggactgggaacagacagccgcctacaacctggaccaagtccttgaacagggaggtgtgtccagtttgtttcagaatctcgccgtgtccgtaactccgatccaaaggattgtccggagcggtgaaaatgccctgaagatcgacatccatgtcatcatcccgtatgaaggtctgagcgccgaccaaatggcccagatcgaaaaaatttttaaggtggtgtaccctgtggatgatcatcactttaaggtgatcctgcactatggcacactggtaatcgacggggttacgccgaacatgatcaactatttcggacggccgtatgaaggcatcgccgtgttcgacggcaaaaagatcactgtaacagggaccctgtggaacggcaacaaaattatcgacgagcgcctgatcacccccgacggctccatgctgttccgagtaaccatcaacagc

SEQ ID NO: 1272 - protein, 159 aa, Artificial Sequence
  Synthetic
MVFTLEDFVGDWEQTAAYNLDQVLEQGGVSSLFQNLAVSVTPIQRIVRSGENALKIDIHVIIPYEGLSADQMAQIEKIFKVVYPVDDHHFKVILHYGTLVIDGVTPNMINYFGRPYEGIAVFDGKKITVTGTLWNGNKIIDERLITPDGSMLFRVTINS

SEQ ID NO: 1273 - DNA, 477 bp, Artificial Sequence
  Synthetic
atggtcttcacactcgaagatttcgttggggactgggaacagacagccgcctacaacctggaccaagtccttgaacagggaggtgtgtccagtttgtttcagaatctcgccgtgtccgtaactccgatccaaaggattgtccacagcggtgaaaatgccctgaagatcgacatccatgtcatcatcccgtatgaaggtctgagcgccgaccaaatggcccagatcgaaaaaatttttaaggtggtgtaccctgtggatgatcatcactttaaggtgatcctgcactatggcacactggtaatcgacggggttacgccgaacatgatcaactatttcggacggccgtatgaaggcatcgccgtgttcgacggcaaaaagatcactgtaacagggaccctgtggaacggcaacaaaattatcgacgagcgcctgatcacccccgacggctccatgctgttccgagtaaccatcaaccac

SEQ ID NO: 1274 - protein, 159 aa, Artificial Sequence
  Synthetic
MVFTLEDFVGDWEQTAAYNLDQVLEQGGVSSLFQNLAVSVTPIQRIVHSGENALKIDIHVIIPYEGLSADQMAQIEKIFKVVYPVDDHHFKVILHYGTLVIDGVTPNMINYFGRPYEGIAVFDGKKITVTGTLWNGNKIIDERLITPDGSMLFRVTINH

SEQ ID NO: 1275 - DNA, 477 bp, Artificial Sequence
  Synthetic
atggtcttcacactcgaagatttcgttggggactgggaacagacagccgcctacaacctggaccaagtccttgaacagggaggtgtgtccagtttgtttcagaatctcgccgtgtccgtaactccgatccaaaggattgtccggagcggtgaaaatgccctgaagatcgacatccatgtcatcatcccgtatgaaggtctgagcgccgaccaaatggcccagatcgaaaaaatttttaaggtggtgtaccctgtggatgatcatcactttaaggtgatcctgccctatggcacactggtaatcgacggggttacgccgaacatgatcaactatttcggacggccgtatgaaggcatcgccgtgttcgacggcaaaaagatcactgtaacagggaccctgtggaacggcaacaaaattatcgacgagcgcctgatcacccccgacggctccatgctgttccgagtaaccatcaacccc

SEQ ID NO: 1276 - protein, 159 aa, Artificial Sequence
  Synthetic
MVFTLEDFVGDWEQTAAYNLDQVLEQGGVSSLFQNLAVSVTPIQRIVRSGENALKIDIHVIIPYEGLSADQMAQIEKIFKVVYPVDDHHFKVILPYGTLVIDGVTPNMINYFGRPYEGIAVFDGKKITVTGTLWNGNKIIDERLITPDGSMLFRVTINP

SEQ ID NO: 1277 - DNA, 477 bp, Artificial Sequence
  Synthetic
atggtcttcacactcgaagatttcgttggggactgggaacagacagccgcctacaacctggaccaagtccttgaacagggaggtgtgtccagtttgctgcagaatctcgccgtgtccgtaactccgatccaaaggattgtccggagcggtgaaaatgccctgaagatcgacatccatgtcatcatcccgtatgaaggtctgagcgccgaccaaatggcccagatcgaaaaaatttttaaggtggtgtaccctgtggatgatcatcactttaaggtgatcctgccctatggcacactggtaatcgacggggttacgccgaacatgatcaactatttcggacggccgtatgaaggcatcgccgtgttcgacggcaaaaagatcactgtaacagggaccctgtggaacggcaacaaaattatcgacgagcgcctgatcacccccgacggctccatgctgttccgagtaaccatcaacccc

SEQ ID NO: 1278 - protein, 159 aa, Artificial Sequence
  Synthetic
MVFTLEDFVGDWEQTAAYNLDQVLEQGGVSSLLQNLAVSVTPIQRIVRSGENALKIDIHVIIPYEGLSADQMAQIEKIFKVVYPVDDHHFKVILPYGTLVIDGVTPNMINYFGRPYEGIAVFDGKKITVTGTLWNGNKIIDERLITPDGSMLFRVTINP

SEQ ID NO: 1279 - DNA, 477 bp, Artificial Sequence
  Synthetic
atggtcttcacactcgaagatttcgttggggactgggaacagacagccgcctacaacctggaccaagtccttgaacagggaggtgtgtccagtttgtttcagaatctcgccgtgtccgtaactccgatccaaaggattgtccggagcggtgaaaatgccctgaagatcgacatccatgtcatcatcccgtatgaaggtctgagcgccgaccaaatggcccagatcgaagagatttttaaggtggtgtaccctgtggatgatcatcactttaaggtgatcctgccctatggcacactggtaatcgacggggttacgccgaacatgatcaactatttcggacggccgtatgaaggcatcgccgtgttcgacggcaaaaagatcactgtaacagggaccctgtggaacggcaacaaaattatcgacgagcgcctgatcacccccgacggctccatgctgttccgagtaaccatcaacccc

SEQ ID NO: 1280 - protein, 159 aa, Artificial Sequence
  Synthetic
MVFTLEDFVGDWEQTAAYNLDQVLEQGGVSSLFQNLAVSVTPIQRIVRSGENALKIDIHVIIPYEGLSADQMAQIEEIFKVVYPVDDHHFKVILPYGTLVIDGVTPNMINYFGRPYEGIAVFDGKKITVTGTLWNGNKIIDERLITPDGSMLFRVTINP

SEQ ID NO: 1281 - DNA, 477 bp, Artificial Sequence
  Synthetic
atggtcttcacactcgaagatttcgttggggactgggaacagacagccgcctacaacctggaccaagtccttgaacagggaggtgtgtccagtttgtttcagaatctcgccgtgtccgtaactccgatccaaaggattgtccggagcggtgaaaatgccctgaagatcgacatccatgtcatcatcccgtatgaaggtctgagcgccgaccaaatggcccagatcgaaaaagtgtttaaggtggtgtaccctgtggatgatcatcactttaaggtgatcctgccctatggcacactggtaatcgacggggttacgccgaacatgatcaactatttcggacggccgtatgaaggcatcgccgtgttcgacggcaaaaagatcactgtaacagggaccctgtggaacggcaacaaaattatcgacgagcgcctgatcacccccgacggctccatgctgttccgagtaaccatcaacccc

SEQ ID NO: 1282 - protein, 159 aa, Artificial Sequence
  Synthetic
MVFTLEDFVGDWEQTAAYNLDQVLEQGGVSSLFQNLAVSVTPIQRIVRSGENALKIDIHVIIPYEGLSADQMAQIEKVFKVVYPVDDHHFKVILPYGTLVIDGVTPNMINYFGRPYEGIAVFDGKKITVTGTLWNGNKIIDERLITPDGSMLFRVTINP

SEQ ID NO: 1283 - DNA, 477 bp, Artificial Sequence
  Synthetic
atggtcttcacactcgaagatttcgttggggactgggaacagacagccgcctacaacctggaccaagtccttgaacagggaggtgtgtccagtttgctgcagaatctcgccgtgtccgtaactccgatccaaaggattgtccggagcggtgaaaatgccctgaagatcgacatccatgtcatcatcccgtatgaaggtctgagcgccgaccaaatggcccagatcgaaaaaatttttaaggtggtgtaccctgtggatgatcatcactttaaggtgatcctgccctatggcacactggtaatcgacggggttacgccgaacatgatcaactatttcggacggccgtatgaaggcatcgccgtgttcgacggcaaaaagatcactgtaacagggaccctgtggaacggcaacaaaattatcgacgagcgcctgatcacccccgacggctccatgctgttccgagtaaccatcaacagc

SEQ ID NO: 1284 - protein, 159 aa, Artificial Sequence
  Synthetic
MVFTLEDFVGDWEQTAAYNLDQVLEQGGVSSLLQNLAVSVTPIQRIVRSGENALKIDIHVIIPYEGLSADQMAQIEKIFKVVYPVDDHHFKVILPYGTLVIDGVTPNMINYFGRPYEGIAVFDGKKITVTGTLWNGNKIIDERLITPDGSMLFRVTINS

SEQ ID NO: 1285 - DNA, 477 bp, Artificial Sequence
  Synthetic
atggtcttcacactcgaagatttcgttggggactgggaacagacagccgcctacaacctggaccaagtccttgaacagggaggtgtgtccagtttgtttcagaatctcgccgtgtccgtaactccgatccaaaggattgtccggagcggtgaaaatgccctgaagatcgacatccatgtcatcatcccgtatgaaggtctgagcgccgaccaaatggcccagatcgaagagatttttaaggtggtgtaccctgtggatgatcatcactttaaggtgatcctgccctatggcacactggtaatcgacggggttacgccgaacatgatcaactatttcggacggccgtatgaaggcatcgccgtgttcgacggcaaaaagatcactgtaacagggaccctgtggaacggcaacaaaattatcgacgagcgcctgatcacccccgacggctccatgctgttccgagtaaccatcaacagc

SEQ ID NO: 1286 - protein, 159 aa, Artificial Sequence
  Synthetic
MVFTLEDFVGDWEQTAAYNLDQVLEQGGVSSLFQNLAVSVTPIQRIVRSGENALKIDIHVIIPYEGLSADQMAQIEEIFKVVYPVDDHHFKVILPYGTLVIDGVTPNMINYFGRPYEGIAVFDGKKITVTGTLWNGNKIIDERLITPDGSMLFRVTINS

SEQ ID NO: 1287 - DNA, 477 bp, Artificial Sequence
  Synthetic
atggtcttcacactcgaagatttcgttggggactgggaacagacagccgcctacaacctggaccaagtccttgaacagggaggtgtgtccagtttgtttcagaatctcgccgtgtccgtaactccgatccaaaggattgtccggagcggtgaaaatgccctgaagatcgacatccatgtcatcatcccgtatgaaggtctgagcgccgaccaaatggcccagatcgaaaaagtgtttaaggtggtgtaccctgtggatgatcatcactttaaggtgatcctgccctatggcacactggtaatcgacggggttacgccgaacatgatcaactatttcggacggccgtatgaaggcatcgccgtgttcgacggcaaaaagatcactgtaacagggaccctgtggaacggcaacaaaattatcgacgagcgcctgatcacccccgacggctccatgctgttccgagtaaccatcaacagc

SEQ ID NO: 1288 - protein, 159 aa, Artificial Sequence
  Synthetic
MVFTLEDFVGDWEQTAAYNLDQVLEQGGVSSLFQNLAVSVTPIQRIVRSGENALKIDIHVIIPYEGLSADQMAQIEKVFKVVYPVDDHHFKVILPYGTLVIDGVTPNMINYFGRPYEGIAVFDGKKITVTGTLWNGNKIIDERLITPDGSMLFRVTINS

SEQ ID NO: 1289 - DNA, 477 bp, Artificial Sequence
  Synthetic
atggtcttcacactcgaagatttcgttggggactgggaacagacagccgcctacaacctggaccaagtccttgaacagggaggtgtgtccagtttgctgcagaatctcgccgtgtccgtaactccgatccaaaggattgtccggagcggtgaaaataccctgaagatcgacatccatgtcatcatcccgtatgaaggtctgagcgccgaccaaatggcccagatcgaagaggtgtttaaggtggtgtaccctgtggatgatcatcactttaaggtgatcctgccctatggcacactggtaatcgacggggttacgccgaacatgctgaactatttcggacggccgtatgaaggcatcgccgtgttcgacggcaaaaagatcactgtaacagggaccctgtggaacggcaacaaaattatcgacgagcgcctgatcacccccgacggctccatgctgttccgagtaaccatcaacagc

SEQ ID NO: 1290 - protein, 159 aa, Artificial Sequence
  Synthetic
MVFTLEDFVGDWEQTAAYNLDQVLEQGGVSSLLQNLAVSVTPIQRIVRSGENTLKIDIHVIIPYEGLSADQMAQIEEVFKVVYPVDDHHFKVILPYGTLVIDGVTPNMLNYFGRPYEGIAVFDGKKITVTGTLWNGNKIIDERLITPDGSMLFRVTINS

SEQ ID NO: 1291 - DNA, 477 bp, Artificial Sequence
  Synthetic
atggtcttcacactcgaagatttcgttggggactgggaacagacagccgcctacaacctggaccaagtccttgaacagggaggtgtgtccagtttgctgcagaatctcgccgtgtccgtaactccgatccaaaggattgtccggagcggtgaaaatgccctgaagatcgacatccatgtcatcatcccgtatgaaggtctgagcgccgaccaaatggcccagatcgaagaggtgtttaaggtggtgtaccctgtggatgatcatcactttaaggtgatcctgccctatggcacactggtaatcgacggggttacgccgaacatgctgaactatttcggacggccgtatgaaggcatcgccgtgttcgacggcaaaaagatcactgtaacagggaccctgtggaacggcaacaaaattatcgacgagcgcctgatcacccccgacggctccatgctgttccgagtaaccatcaacagc

SEQ ID NO: 1292 - protein, 159 aa, Artificial Sequence
  Synthetic
MVFTLEDFVGDWEQTAAYNLDQVLEQGGVSSLLQNLAVSVTPIQRIVRSGENALKIDIHVIIPYEGLSADQMAQIEEVFKVVYPVDDHHFKVILPYGTLVIDGVTPNMLNYFGRPYEGIAVFDGKKITVTGTLWNGNKIIDERLITPDGSMLFRVTINS

SEQ ID NO: 1293 - DNA, 477 bp, Artificial Sequence
  Synthetic
atggtcttcacactcgaagatttcgttggggactgggaacagacagccgcctacaacctggaccaagtccttgaacagggaggtgtgtccagtttgctgcagaatctcgccgtgtccgtaactccgatccaaaggattgtccggagcggtgaaaataccctgaagatcgacatccatgtcatcatcccgtatgaaggtctgagcgccgaccaaatggcccagatcgaaaaagtgtttaaggtggtgtaccctgtggatgatcatcactttaaggtgatcctgccctatggcacactggtaatcgacggggttacgccgaacatgctgaactatttcggacggccgtatgaaggcatcgccgtgttcgacggcaaaaagatcactgtaacagggaccctgtggaacggcaacaaaattatcgacgagcgcctgatcacccccgacggctccatgctgttccgagtaaccatcaacagc

SEQ ID NO: 1294 - protein, 159 aa, Artificial Sequence
  Synthetic
MVFTLEDFVGDWEQTAAYNLDQVLEQGGVSSLLQNLAVSVTPIQRIVRSGENTLKIDIHVIIPYEGLSADQMAQIEKVFKVVYPVDDHHFKVILPYGTLVIDGVTPNMLNYFGRPYEGIAVFDGKKITVTGTLWNGNKIIDERLITPDGSMLFRVTINS

SEQ ID NO: 1295 - DNA, 477 bp, Artificial Sequence
  Synthetic
atggtcttcacactcgaagatttcgttggggactgggaacagacagccgcctacaacctggaccaagtccttgaacagggaggtgtgtccagtttgctgcagaatctcgccgtgtccgtaactccgatccaaaggattgtccggagcggtgaaaataccctgaagatcgacatccatgtcatcatcccgtatgaaggtctgagcgccgaccaaatggcccagatcgaagagatttttaaggtggtgtaccctgtggatgatcatcactttaaggtgatcctgccctatggcacactggtaatcgacggggttacgccgaacatgctgaactatttcggacggccgtatgaaggcatcgccgtgttcgacggcaaaaagatcactgtaacagggaccctgtggaacggcaacaaaattatcgacgagcgcctgatcacccccgacggctccatgctgttccgagtaaccatcaacagc

SEQ ID NO: 1296 - protein, 159 aa, Artificial Sequence
  Synthetic
MVFTLEDFVGDWEQTAAYNLDQVLEQGGVSSLLQNLAVSVTPIQRIVRSGENTLKIDIHVIIPYEGLSADQMAQIEEIFKVVYPVDDHHFKVILPYGTLVIDGVTPNMLNYFGRPYEGIAVFDGKKITVTGTLWNGNKIIDERLITPDGSMLFRVTINS

SEQ ID NO: 1297 - DNA, 477 bp, Artificial Sequence
  Synthetic
atggtcttcacactcgaagatttcgttggggactgggaacagacagccgcctacaacctggaccaagtccttgaacagggaggtgtgtccagtttgctgcagaatctcgccgtgtccgtaactccgatccaaaggattgtccggagcggtgaaaataccctgaagatcgacatccatgtcatcatcccgtatgaaggtctgagcgccgaccaaatggcccagatcgaagaggtgtttaaggtggtgtaccctgtggatgatcatcactttaaggtgatcctgccctatggcacactggtaatcgacggggttacgccgaacatgatcaactatttcggacggccgtatgaaggcatcgccgtgttcgacggcaaaaagatcactgtaacagggaccctgtggaacggcaacaaaattatcgacgagcgcctgatcacccccgacggctccatgctgttccgagtaaccatcaacagc

SEQ ID NO: 1298 - protein, 159 aa, Artificial Sequence
  Synthetic
MVFTLEDFVGDWEQTAAYNLDQVLEQGGVSSLLQNLAVSVTPIQRIVRSGENTLKIDIHVIIPYEGLSADQMAQIEEVFKVVYPVDDHHFKVILPYGTLVIDGVTPNMINYFGRPYEGIAVFDGKKITVTGTLWNGNKIIDERLITPDGSMLFRVTINS

SEQ ID NO: 1299 - DNA, 474 bp, Artificial Sequence
  Synthetic
gtcttcacactcgaagatttcgttggggactggcaacagacagccggctacaacctggaccaagtccttgaacagggaggtgtgtccagtttgtttcagaatctcggggtgtccgtaactccgatccaaaggattgtcctgagcggtgaaaatgggctgaagatcgacatccatgtcatcatcccgtatgaaggtctgagcggcgaccaaatgggccagatcgaaaaaatttttaaggtggtgtaccctgtggatgatcatcactttaaggtgatcctgcactatggcacactggtaatcgacggggttacgccgaacatgatcgactatttcggacggccgtatgaaggcatcgccgtgttcgacggcaaaaagatcactgtaacagggaccctgtggaacggcaacaaaattatcgacgagcgcctgatcaaccccgacggctccctgctgttccgagtaaccatcaacgtt

SEQ ID NO: 1300 - protein, 158 aa, Artificial Sequence
  Synthetic
VFTLEDFVGDWNQTAGYNLDQVLEQGGVSSLFQNLGVSVTPIQRIVLSGENGLKIDIHVIIPYEGLSGDQMGQIEKIFKVVYPVDDHHFKVILHYGTLVIDGVTPNMIDYFGRPYEGIAVFDGKKITVTGTLWNGNKIIDERLINPDGSLLFRVTINV

SEQ ID NO: 1301 - DNA, 474 bp, Artificial Sequence
  Synthetic
gtcttcacactcgaagatttcgttggggactggcgacagatcgccggctacaacctggaccaagtccttgaacagggaggtgtgtccagtttgtttcagaatctcggggtgtccgtaactccgatccaaaggattgtcctgagcggtgaaaatgggctgaagatcgacatccatgtcatcatcccgtatgaaggtctgagcggcgaccaaatgggccagatcgaaaaaatttttaaggtggtgtaccctgtggatgatcatcactttaaggtgatcctgcactatggcacactggtaatcgacggggttacgccgaacatgatcgactatttcggacggccgtatgaaggcatcgccgtgttcgacggcaaaaagatcactgtaacagggaccctgtggaacggcaacaaaattatcgacgagcgcctgatcaaccccgacggctccctgctgttccgagtaaccatcaacgtt

SEQ ID NO: 1302 - protein, 158 aa, Artificial Sequence
  Synthetic
VFTLEDFVGDWRQIAGYNLDQVLEQGGVSSLFQNLGVSVTPIQRIVLSGENGLKIDIHVIIPYEGLSGDQMGQIEKIFKVVYPVDDHHFKVILHYGTLVIDGVTPNMIDYFGRPYEGIAVFDGKKITVTGTLWNGNKIIDERLINPDGSLLFRVTINV

SEQ ID NO: 1303 - DNA, 474 bp, Artificial Sequence
  Synthetic
gtcttcacactcgaagatttcgttggggactggcgacagacagccagctacaacctggaccaagtccttgaacagggaggtgtgtccagtttgtttcagaatctcggggtgtccgtaactccgatccaaaggattgtcctgagcggtgaaaatgggctgaagatcgacatccatgtcatcatcccgtatgaaggtctgagcggcgaccaaatgggccagatcgaaaaaatttttaaggtggtgtaccctgtggatgatcatcactttaaggtgatcctgcactatggcacactggtaatcgacggggttacgccgaacatgatcgactatttcggacggccgtatgaaggcatcgccgtgttcgacggcaaaaagatcactgtaacagggaccctgtggaacggcaacaaaattatcgacgagcgcctgatcaaccccgacggctccctgctgttccgagtaaccatcaacgtt

SEQ ID NO: 1304 - protein, 158 aa, Artificial Sequence
  Synthetic
VFTLEDFVGDWRQTASYNLDQVLEQGGVSSLFQNLGVSVTPIQRIVLSGENGLKIDIHVIIPYEGLSGDQMGQIEKIFKVVYPVDDHHFKVILHYGTLVIDGVTPNMIDYFGRPYEGIAVFDGKKITVTGTLWNGNKIIDERLINPDGSLLFRVTINV

SEQ ID NO: 1305 - DNA, 474 bp, Artificial Sequence
  Synthetic
gtcttcacactcgaagatttcgttggggactggcgacagacagccggctacaaccaggaccaagtccttgaacagggaggtgtgtccagtttgtttcagaatctcggggtgtccgtaactccgatccaaaggattgtcctgagcggtgaaaatgggctgaagatcgacatccatgtcatcatcccgtatgaaggtctgagcggcgaccaaatgggccagatcgaaaaaatttttaaggtggtgtaccctgtggatgatcatcactttaaggtgatcctgcactatggcacactggtaatcgacggggttacgccgaacatgatcgactatttcggacggccgtatgaaggcatcgccgtgttcgacggcaaaaagatcactgtaacagggaccctgtggaacggcaacaaaattatcgacgagcgcctgatcaaccccgacggctccctgctgttccgagtaaccatcaacgtt

SEQ ID NO: 1306 - protein, 158 aa, Artificial Sequence
  Synthetic
VFTLEDFVGDWRQTAGYNQDQVLEQGGVSSLFQNLGVSVTPIQRIVLSGENGLKIDIHVIIPYEGLSGDQMGQIEKIFKVVYPVDDHHFKVILHYGTLVIDGVTPNMIDYFGRPYEGIAVFDGKKITVTGTLWNGNKIIDERLINPDGSLLFRVTINV

SEQ ID NO: 1307 - DNA, 474 bp, Artificial Sequence
  Synthetic
gtcttcacactcgaagatttcgttggggactggcgacagacagccggctacaacctggacaaggtccttgaacagggaggtgtgtccagtttgtttcagaatctcggggtgtccgtaactccgatccaaaggattgtcctgagcggtgaaaatgggctgaagatcgacatccatgtcatcatcccgtatgaaggtctgagcggcgaccaaatgggccagatcgaaaaaatttttaaggtggtgtaccctgtggatgatcatcactttaaggtgatcctgcactatggcacactggtaatcgacggggttacgccgaacatgatcgactatttcggacggccgtatgaaggcatcgccgtgttcgacggcaaaaagatcactgtaacagggaccctgtggaacggcaacaaaattatcgacgagcgcctgatcaaccccgacggctccctgctgttccgagtaaccatcaacgtt

SEQ ID NO: 1308 - protein, 158 aa, Artificial Sequence
  Synthetic
VFTLEDFVGDWRQTAGYNLDKVLEQGGVSSLFQNLGVSVTPIQRIVLSGENGLKIDIHVIIPYEGLSGDQMGQIEKIFKVVYPVDDHHFKVILHYGTLVIDGVTPNMIDYFGRPYEGIAVFDGKKITVTGTLWNGNKIIDERLINPDGSLLFRVTINV

SEQ ID NO: 1309 - DNA, 474 bp, Artificial Sequence
  Synthetic
gtcttcacactcgaagatttcgttggggactggcgacagacagccggctacaacctggaccaagtccttgaacagggaggtatgtccagtttgtttcagaatctcggggtgtccgtaactccgatccaaaggattgtcctgagcggtgaaaatgggctgaagatcgacatccatgtcatcatcccgtatgaaggtctgagcggcgaccaaatgggccagatcgaaaaaatttttaaggtggtgtaccctgtggatgatcatcactttaaggtgatcctgcactatggcacactggtaatcgacggggttacgccgaacatgatcgactatttcggacggccgtatgaaggcatcgccgtgttcgacggcaaaaagatcactgtaacagggaccctgtggaacggcaacaaaattatcgacgagcgcctgatcaaccccgacggctccctgctgttccgagtaaccatcaacgtt

SEQ ID NO: 1310 - protein, 158 aa, Artificial Sequence
  Synthetic
VFTLEDFVGDWRQTAGYNLDQVLEQGGMSSLFQNLGVSVTPIQRIVLSGENGLKIDIHVIIPYEGLSGDQMGQIEKIFKVVYPVDDHHFKVILHYGTLVIDGVTPNMIDYFGRPYEGIAVFDGKKITVTGTLWNGNKIIDERLINPDGSLLFRVTINV

SEQ ID NO: 1311 - DNA, 474 bp, Artificial Sequence
  Synthetic
gtcttcacactcgaagatttcgttggggactggcgacagacagccggctacaacctggaccaagtccttgaacagggaggtgtgtccagtttgatacagaatctcggggtgtccgtaactccgatccaaaggattgtcctgagcggtgaaaatgggctgaagatcgacatccatgtcatcatcccgtatgaaggtctgagcggcgaccaaatgggccagatcgaaaaaatttttaaggtggtgtaccctgtggatgatcatcactttaaggtgatcctgcactatggcacactggtaatcgacggggttacgccgaacatgatcgactatttcggacggccgtatgaaggcatcgccgtgttcgacggcaaaaagatcactgtaacagggaccctgtggaacggcaacaaaattatcgacgagcgcctgatcaaccccgacggctccctgctgttccgagtaaccatcaacgtt

SEQ ID NO: 1312 - protein, 158 aa, Artificial Sequence
  Synthetic
VFTLEDFVGDWRQTAGYNLDQVLEQGGVSSLIQNLGVSVTPIQRIVLSGENGLKIDIHVIIPYEGLSGDQMGQIEKIFKVVYPVDDHHFKVILHYGTLVIDGVTPNMIDYFGRPYEGIAVFDGKKITVTGTLWNGNKIIDERLINPDGSLLFRVTINV

SEQ ID NO: 1313 - DNA, 474 bp, Artificial Sequence
  Synthetic
gtcttcacactcgaagatttcgttggggactggcgacagacagccggctacaacctggaccaagtccttgaacagggaggtgtgtccagtttgttgcagaatctcggggtgtccgtaactccgatccaaaggattgtcctgagcggtgaaaatgggctgaagatcgacatccatgtcatcatcccgtatgaaggtctgagcggcgaccaaatgggccagatcgaaaaaatttttaaggtggtgtaccctgtggatgatcatcactttaaggtgatcctgcactatggcacactggtaatcgacggggttacgccgaacatgatcgactatttcggacggccgtatgaaggcatcgccgtgttcgacggcaaaaagatcactgtaacagggaccctgtggaacggcaacaaaattatcgacgagcgcctgatcaaccccgacggctccctgctgttccgagtaaccatcaacgtt

SEQ ID NO: 1314 - protein, 158 aa, Artificial Sequence
  Synthetic
VFTLEDFVGDWRQTAGYNLDQVLEQGGVSSLLQNLGVSVTPIQRIVLSGENGLKIDIHVIIPYEGLSGDQMGQIEKIFKVVYPVDDHHFKVILHYGTLVIDGVTPNMIDYFGRPYEGIAVFDGKKITVTGTLWNGNKIIDERLINPDGSLLFRVTINV

SEQ ID NO: 1315 - DNA, 474 bp, Artificial Sequence
  Synthetic
gtcttcacactcgaagatttcgttggggactggcgacagacagccggctacaacctggaccaagtccttgaacagggaggtgtgtccagtttggttcagaatctcggggtgtccgtaactccgatccaaaggattgtcctgagcggtgaaaatgggctgaagatcgacatccatgtcatcatcccgtatgaaggtctgagcggcgaccaaatgggccagatcgaaaaaatttttaaggtggtgtaccctgtggatgatcatcactttaaggtgatcctgcactatggcacactggtaatcgacggggttacgccgaacatgatcgactatttcggacggccgtatgaaggcatcgccgtgttcgacggcaaaaagatcactgtaacagggaccctgtggaacggcaacaaaattatcgacgagcgcctgatcaaccccgacggctccctgctgttccgagtaaccatcaacgtt

SEQ ID NO: 1316 - protein, 158 aa, Artificial Sequence
  Synthetic
VFTLEDFVGDWRQTAGYNLDQVLEQGGVSSLVQNLGVSVTPIQRIVLSGENGLKIDIHVIIPYEGLSGDQMGQIEKIFKVVYPVDDHHFKVILHYGTLVIDGVTPNMIDYFGRPYEGIAVFDGKKITVTGTLWNGNKIIDERLINPDGSLLFRVTINV

SEQ ID NO: 1317 - DNA, 474 bp, Artificial Sequence
  Synthetic
gtcttcacactcgaagatttcgttggggactggcgacagacagccggctacaacctggaccaagtccttgaacagggaggtgtgtccagtttgtttcggaatctcggggtgtccgtaactccgatccaaaggattgtcctgagcggtgaaaatgggctgaagatcgacatccatgtcatcatcccgtatgaaggtctgagcggcgaccaaatgggccagatcgaaaaaatttttaaggtggtgtaccctgtggatgatcatcactttaaggtgatcctgcactatggcacactggtaatcgacggggttacgccgaacatgatcgactatttcggacggccgtatgaaggcatcgccgtgttcgacggcaaaaagatcactgtaacagggaccctgtggaacggcaacaaaattatcgacgagcgcctgatcaaccccgacggctccctgctgttccgagtaaccatcaacgtt

SEQ ID NO: 1318 - protein, 158 aa, Artificial Sequence
  Synthetic
VFTLEDFVGDWRQTAGYNLDQVLEQGGVSSLFRNLGVSVTPIQRIVLSGENGLKIDIHVIIPYEGLSGDQMGQIEKIFKVVYPVDDHHFKVILHYGTLVIDGVTPNMIDYFGRPYEGIAVFDGKKITVTGTLWNGNKIIDERLINPDGSLLFRVTINV

SEQ ID NO: 1319 - DNA, 474 bp, Artificial Sequence
  Synthetic
gtcttcacactcgaagatttcgttggggactggcgacagacagccggctacaacctggaccaagtccttgaacagggaggtgtgtccagtttgtttcagaaactcggggtgtccgtaactccgatccaaaggattgtcctgagcggtgaaaatgggctgaagatcgacatccatgtcatcatcccgtatgaaggtctgagcggcgaccaaatgggccagatcgaaaaaatttttaaggtggtgtaccctgtggatgatcatcactttaaggtgatcctgcactatggcacactggtaatcgacggggttacgccgaacatgatcgactatttcggacggccgtatgaaggcatcgccgtgttcgacggcaaaaagatcactgtaacagggaccctgtggaacggcaacaaaattatcgacgagcgcctgatcaaccccgacggctccctgctgttccgagtaaccatcaacgtt

SEQ ID NO: 1320 - protein, 158 aa, Artificial Sequence
  Synthetic
VFTLEDFVGDWRQTAGYNLDQVLEQGGVSSLFQKLGVSVTPIQRIVLSGENGLKIDIHVIIPYEGLSGDQMGQIEKIFKVVYPVDDHHFKVILHYGTLVIDGVTPNMIDYFGRPYEGIAVFDGKKITVTGTLWNGNKIIDERLINPDGSLLFRVTINV

SEQ ID NO: 1321 - DNA, 474 bp, Artificial Sequence
  Synthetic
gtcttcacactcgaagatttcgttggggactggcgacagacagccggctacaacctggaccaagtccttgaacagggaggtgtgtccagtttgtttcagcggctcggggtgtccgtaactccgatccaaaggattgtcctgagcggtgaaaatgggctgaagatcgacatccatgtcatcatcccgtatgaaggtctgagcggcgaccaaatgggccagatcgaaaaaatttttaaggtggtgtaccctgtggatgatcatcactttaaggtgatcctgcactatggcacactggtaatcgacggggttacgccgaacatgatcgactatttcggacggccgtatgaaggcatcgccgtgttcgacggcaaaaagatcactgtaacagggaccctgtggaacggcaacaaaattatcgacgagcgcctgatcaaccccgacggctccctgctgttccgagtaaccatcaacgtt

SEQ ID NO: 1322 - protein, 158 aa, Artificial Sequence
  Synthetic
VFTLEDFVGDWRQTAGYNLDQVLEQGGVSSLFQRLGVSVTPIQRIVLSGENGLKIDIHVIIPYEGLSGDQMGQIEKIFKVVYPVDDHHFKVILHYGTLVIDGVTPNMIDYFGRPYEGIAVFDGKKITVTGTLWNGNKIIDERLINPDGSLLFRVTINV

SEQ ID NO: 1323 - DNA, 474 bp, Artificial Sequence
  Synthetic
gtcttcacactcgaagatttcgttggggactggcgacagacagccggctacaacctggaccaagtccttgaacagggaggtgtgtccagtttgtttcagaatctcggggtgtccgtaactccgatccaaaggattgtcctgagcggtgaaaatgggctgaagatcgacaaccatgtcatcatcccgtatgaaggtctgagcggcgaccaaatgggccagatcgaaaaaatttttaaggtggtgtaccctgtggatgatcatcactttaaggtgatcctgcactatggcacactggtaatcgacggggttacgccgaacatgatcgactatttcggacggccgtatgaaggcatcgccgtgttcgacggcaaaaagatcactgtaacagggaccctgtggaacggcaacaaaattatcgacgagcgcctgatcaaccccgacggctccctgctgttccgagtaaccatcaacgtt

SEQ ID NO: 1324 - protein, 158 aa, Artificial Sequence
  Synthetic
VFTLEDFVGDWRQTAGYNLDQVLEQGGVSSLFQNLGVSVTPIQRIVLSGENGLKIDNHVIIPYEGLSGDQMGQIEKIFKVVYPVDDHHFKVILHYGTLVIDGVTPNMIDYFGRPYEGIAVFDGKKITVTGTLWNGNKIIDERLINPDGSLLFRVTINV

SEQ ID NO: 1325 - DNA, 474 bp, Artificial Sequence
  Synthetic
gtcttcacactcgaagatttcgttggggactggcgacagacagccggctacaacctggaccaagtccttgaacagggaggtgtgtccagtttgtttcagaatctcggggtgtccgtaactccgatccaaaggattgtcctgagcggtgaaaatgggctgaagatcgacatccatgccatcatcccgtatgaaggtctgagcggcgaccaaatgggccagatcgaaaaaatttttaaggtggtgtaccctgtggatgatcatcactttaaggtgatcctgcactatggcacactggtaatcgacggggttacgccgaacatgatcgactatttcggacggccgtatgaaggcatcgccgtgttcgacggcaaaaagatcactgtaacagggaccctgtggaacggcaacaaaattatcgacgagcgcctgatcaaccccgacggctccctgctgttccgagtaaccatcaacgtt

SEQ ID NO: 1326 - protein, 158 aa, Artificial Sequence
  Synthetic
VFTLEDFVGDWRQTAGYNLDQVLEQGGVSSLFQNLGVSVTPIQRIVLSGENGLKIDIHAIIPYEGLSGDQMGQIEKIFKVVYPVDDHHFKVILHYGTLVIDGVTPNMIDYFGRPYEGIAVFDGKKITVTGTLWNGNKIIDERLINPDGSLLFRVTINV

SEQ ID NO: 1327 - DNA, 474 bp, Artificial Sequence
  Synthetic
gtcttcacactcgaagatttcgttggggactggcgacagacagccggctacaacctggaccaagtccttgaacagggaggtgtgtccagtttgtttcagaatctcggggtgtccgtaactccgatccaaaggattgtcctgagcggtgaaaatgggctgaagatcgacatccatgtcaccatcccgtatgaaggtctgagcggcgaccaaatgggccagatcgaaaaaatttttaaggtggtgtaccctgtggatgatcatcactttaaggtgatcctgcactatggcacactggtaatcgacggggttacgccgaacatgatcgactatttcggacggccgtatgaaggcatcgccgtgttcgacggcaaaaagatcactgtaacagggaccctgtggaacggcaacaaaattatcgacgagcgcctgatcaaccccgacggctccctgctgttccgagtaaccatcaacgtt

SEQ ID NO: 1328 - protein, 158 aa, Artificial Sequence
  Synthetic
VFTLEDFVGDWRQTAGYNLDQVLEQGGVSSLFQNLGVSVTPIQRIVLSGENGLKIDIHVTIPYEGLSGDQMGQIEKIFKVVYPVDDHHFKVILHYGTLVIDGVTPNMIDYFGRPYEGIAVFDGKKITVTGTLWNGNKIIDERLINPDGSLLFRVTINV

SEQ ID NO: 1329 - DNA, 474 bp, Artificial Sequence
  Synthetic
gtcttcacactcgaagatttcgttggggactggcgacagacagccggctacaacctggaccaagtccttgaacagggaggtgtgtccagtttgtttcagaatctcggggtgtccgtaactccgatccaaaggattgtcctgagcggtgaaaatgggctgaagatcgacatccatgtcatcatcccgtatgaaggtctgagcagcgaccaaatgggccagatcgaaaaaatttttaaggtggtgtaccctgtggatgatcatcactttaaggtgatcctgcactatggcacactggtaatcgacggggttacgccgaacatgatcgactatttcggacggccgtatgaaggcatcgccgtgttcgacggcaaaaagatcactgtaacagggaccctgtggaacggcaacaaaattatcgacgagcgcctgatcaaccccgacggctccctgctgttccgagtaaccatcaacgtt

SEQ ID NO: 1330 - protein, 158 aa, Artificial Sequence
  Synthetic
VFTLEDFVGDWRQTAGYNLDQVLEQGGVSSLFQNLGVSVTPIQRIVLSGENGLKIDIHVIIPYEGLSSDQMGQIEKIFKVVYPVDDHHFKVILHYGTLVIDGVTPNMIDYFGRPYEGIAVFDGKKITVTGTLWNGNKIIDERLINPDGSLLFRVTINV

SEQ ID NO: 1331 - DNA, 474 bp, Artificial Sequence
  Synthetic
gtcttcacactcgaagatttcgttggggactggcgacagacagccggctacaacctggaccaagtccttgaacagggaggtgtgtccagtttgtttcagaatctcggggtgtccgtaactccgatccaaaggattgtcctgagcggtgaaaatgggctgaagatcgacatccatgtcatcatcccgtatgaaggtctgagcgacgaccaaatgggccagatcgaaaaaatttttaaggtggtgtaccctgtggatgatcatcactttaaggtgatcctgcactatggcacactggtaatcgacggggttacgccgaacatgatcgactatttcggacggccgtatgaaggcatcgccgtgttcgacggcaaaaagatcactgtaacagggaccctgtggaacggcaacaaaattatcgacgagcgcctgatcaaccccgacggctccctgctgttccgagtaaccatcaacgtt

SEQ ID NO: 1332 - protein, 158 aa, Artificial Sequence
  Synthetic
VFTLEDFVGDWRQTAGYNLDQVLEQGGVSSLFQNLGVSVTPIQRIVLSGENGLKIDIHVIIPYEGLSDDQMGQIEKIFKVVYPVDDHHFKVILHYGTLVIDGVTPNMIDYFGRPYEGIAVFDGKKITVTGTLWNGNKIIDERLINPDGSLLFRVTINV

SEQ ID NO: 1333 - DNA, 474 bp, Artificial Sequence
  Synthetic
gtcttcacactcgaagatttcgttggggactggcgacagacagccggctacaacctggaccaagtccttgaacagggaggtgtgtccagtttgtttcagaatctcggggtgtccgtaactccgatccaaaggattgtcctgagcggtgaaaatgggctgaagatcgacatccatgtcatcatcccgtatgaaggtctgagcggcgaccaaatgggccagatcgaagagatttttaaggtggtgtaccctgtggatgatcatcactttaaggtgatcctgcactatggcacactggtaatcgacggggttacgccgaacatgatcgactatttcggacggccgtatgaaggcatcgccgtgttcgacggcaaaaagatcactgtaacagggaccctgtggaacggcaacaaaattatcgacgagcgcctgatcaaccccgacggctccctgctgttccgagtaaccatcaacgtt

SEQ ID NO: 1334 - protein, 158 aa, Artificial Sequence
  Synthetic
VFTLEDFVGDWRQTAGYNLDQVLEQGGVSSLFQNLGVSVTPIQRIVLSGENGLKIDIHVIIPYEGLSGDQMGQIEEIFKVVYPVDDHHFKVILHYGTLVIDGVTPNMIDYFGRPYEGIAVFDGKKITVTGTLWNGNKIIDERLINPDGSLLFRVTINV

SEQ ID NO: 1335 - DNA, 474 bp, Artificial Sequence
  Synthetic
gtcttcacactcgaagatttcgttggggactggcgacagacagccggctacaacctggaccaagtccttgaacagggaggtgtgtccagtttgtttcagaatctcggggtgtccgtaactccgatccaaaggattgtcctgagcggtgaaaatgggctgaagatcgacatccatgtcatcatcccgtatgaaggtctgagcggcgaccaaatgggccagatcgaaaaaatttttaaggtggtgtaccctgtggatgatcatcactttaaggtgatcctgcactatggcacactggtaatcgacggggttacgccgaacgtgatcgactatttcggacggccgtatgaaggcatcgccgtgttcgacggcaaaaagatcactgtaacagggaccctgtggaacggcaacaaaattatcgacgagcgcctgatcaaccccgacggctccctgctgttccgagtaaccatcaacgtt

SEQ ID NO: 1336 - protein, 158 aa, Artificial Sequence
  Synthetic
VFTLEDFVGDWRQTAGYNLDQVLEQGGVSSLFQNLGVSVTPIQRIVLSGENGLKIDIHVIIPYEGLSGDQMGQIEKIFKVVYPVDDHHFKVILHYGTLVIDGVTPNVIDYFGRPYEGIAVFDGKKITVTGTLWNGNKIIDERLINPDGSLLFRVTINV

SEQ ID NO: 1337 - DNA, 474 bp, Artificial Sequence
  Synthetic
gtcttcacactcgaagatttcgttggggactggcgacagacagccggctacaacctggaccaagtccttgaacagggaggtgtgtccagtttgtttcagaatctcggggtgtccgtaactccgatccaaaggattgtcctgagcggtgaaaatgggctgaagatcgacatccatgtcatcatcccgtatgaaggtctgagcggcgaccaaatgggccagatcgaaaaaatttttaaggtggtgtaccctgtggatgatcatcactttaaggtgatcctgcactatggcacactggtaatcgacggggttacgccgaacattatcgactatttcggacggccgtatgaaggcatcgccgtgttcgacggcaaaaagatcactgtaacagggaccctgtggaacggcaacaaaattatcgacgagcgcctgatcaaccccgacggctccctgctgttccgagtaaccatcaacgtt

SEQ ID NO: 1338 - protein, 158 aa, Artificial Sequence
  Synthetic
VFTLEDFVGDWRQTAGYNLDQVLEQGGVSSLFQNLGVSVTPIQRIVLSGENGLKIDIHVIIPYEGLSGDQMGQIEKIFKVVYPVDDHHFKVILHYGTLVIDGVTPNIIDYFGRPYEGIAVFDGKKITVTGTLWNGNKIIDERLINPDGSLLFRVTINV

SEQ ID NO: 1339 - DNA, 474 bp, Artificial Sequence
  Synthetic
gtcttcacactcgaagatttcgttggggactggcgacagacagccggctacaacctggaccaagtccttgaacagggaggtgtgtccagtttgtttcagaatctcggggtgtccgtaactccgatccaaaggattgtcctgagcggtgaaaatgggctgaagatcgacatccatgtcatcatcccgtatgaaggtctgagcggcgaccaaatgggccagatcgaaaaaatttttaaggtggtgtaccctgtggatgatcatcactttaaggtgatcctgcactatggcacactggtaatcgacggggttacgccgaacatgatcaactatttcggacggccgtatgaaggcatcgccgtgttcgacggcaaaaagatcactgtaacagggaccctgtggaacggcaacaaaattatcgacgagcgcctgatcaaccccgacggctccctgctgttccgagtaaccatcaacgtt

SEQ ID NO: 1340 - protein, 158 aa, Artificial Sequence
  Synthetic
VFTLEDFVGDWRQTAGYNLDQVLEQGGVSSLFQNLGVSVTPIQRIVLSGENGLKIDIHVIIPYEGLSGDQMGQIEKIFKVVYPVDDHHFKVILHYGTLVIDGVTPNMINYFGRPYEGIAVFDGKKITVTGTLWNGNKIIDERLINPDGSLLFRVTINV

SEQ ID NO: 1341 - DNA, 474 bp, Artificial Sequence
  Synthetic
gtcttcacactcgaagatttcgttggggactggcgacagacagccggctacaacctggaccaagtccttgaacagggaggtgtgtccagtttgtttcagaatctcggggtgtccgtaactccgatccaaaggattgtcctgagcggtgaaaatgggctgaagatcgacatccatgtcatcatcccgtatgaaggtctgagcggcgaccaaatgggccagatcgaaaaaatttttaaggtggtgtaccctgtggatgatcatcactttaaggtgatcctgcactatggcacactggtaatcgacggggttacgccgaacatgatcgactatttcggacagccgtatgaaggcatcgccgtgttcgacggcaaaaagatcactgtaacagggaccctgtggaacggcaacaaaattatcgacgagcgcctgatcaaccccgacggctccctgctgttccgagtaaccatcaacgtt

SEQ ID NO: 1342 - protein, 158 aa, Artificial Sequence
  Synthetic
VFTLEDFVGDWRQTAGYNLDQVLEQGGVSSLFQNLGVSVTPIQRIVLSGENGLKIDIHVIIPYEGLSGDQMGQIEKIFKVVYPVDDHHFKVILHYGTLVIDGVTPNMIDYFGQPYEGIAVFDGKKITVTGTLWNGNKIIDERLINPDGSLLFRVTINV

SEQ ID NO: 1343 - DNA, 474 bp, Artificial Sequence
  Synthetic
gtcttcacactcgaagatttcgttggggactggcgacagacagccggctacaacctggaccaagtccttgaacagggaggtgtgtccagtttgtttcagaatctcggggtgtccgtaactccgatccaaaggattgtcctgagcggtgaaaatgggctgaagatcgacatccatgtcatcatcccgtatgaaggtctgagcggcgaccaaatgggccagatcgaaaaaatttttaaggtggtgtaccctgtggatgatcatcactttaaggtgatcctgcactatggcacactggtaatcgacggggttacgccgaacatgatcgactatttcggacggccgtatgaaggcatcgccgtgttcgacggcaaaaagatcactgtaacagggaccctgtggaacggcaacaaaattatcgacgagcgcctgatcacccccgacggctccctgctgttccgagtaaccatcaacgtt

SEQ ID NO: 1344 - protein, 158 aa, Artificial Sequence
  Synthetic
VFTLEDFVGDWRQTAGYNLDQVLEQGGVSSLFQNLGVSVTPIQRIVLSGENGLKIDIHVIIPYEGLSGDQMGQIEKIFKVVYPVDDHHFKVILHYGTLVIDGVTPNMIDYFGRPYEGIAVFDGKKITVTGTLWNGNKIIDERLITPDGSLLFRVTINV

SEQ ID NO: 1345 - DNA, 474 bp, Artificial Sequence
  Synthetic
gtcttcacactcgaagatttcgttggggactggcgacagacagccggctacaacctggaccaagtccttgaacagggaggtgtgtccagtttgtttcagaatctcggggtgtccgtaactccgatccaaaggattgtcctgagcggtgaaaatgggctgaagatcgacatccatgtcatcatcccgtatgaaggtctgagcggcgaccaaatgggccagatcgaaaaaatttttaaggtggtgtaccctgtggatgatcatcactttaaggtgatcctgcactatggcacactggtaatcgacggggttacgccgaacatgatcgactatttcggacggccgtatgaaggcatcgccgtgttcgacggcaaaaagatcactgtaacagggaccctgtggaacggcaacaaaattatcgacgagcgcctgatcaaccccgacggctccatgctgttccgagtaaccatcaacgtt

SEQ ID NO: 1346 - protein, 158 aa, Artificial Sequence
  Synthetic
VFTLEDFVGDWRQTAGYNLDQVLEQGGVSSLFQNLGVSVTPIQRIVLSGENGLKIDIHVIIPYEGLSGDQMGQIEKIFKVVYPVDDHHFKVILHYGTLVIDGVTPNMIDYFGRPYEGIAVFDGKKITVTGTLWNGNKIIDERLINPDGSMLFRVTINV

SEQ ID NO: 1347 - DNA, 474 bp, Artificial Sequence
  Synthetic
gtcttcacactcgaagatttcgttggggactggcgacagacagccggctacaacctggaccaagtccttgaacagggaggtgtgtccagtttgtttcagaatctcggggtgtccgtaactccgatccaaaggattgtcctgagcggtgaaaatgggctgaagatcgacatccatgtcatcatcccgtatgaaggtctgagcggcgaccaaatgggccagatcgaaaaaatttttaaggtggtgtaccctgtggatgatcatcactttaaggtgatcctgcactatggcacactggtaatcgacggggttacgccgaacatgatcgactatttcggacggccgtatgaaggcatcgccgtgttcgacggcaaaaagatcactgtaacagggaccctgtggaacggcaacaaaattatcgacgagcgcctgatcaaccccgacggctccctgctgttccgagtaaccatcgacgtt

SEQ ID NO: 1348 - protein, 158 aa, Artificial Sequence
  Synthetic
VFTLEDFVGDWRQTAGYNLDQVLEQGGVSSLFQNLGVSVTPIQRIVLSGENGLKIDIHVIIPYEGLSGDQMGQIEKIFKVVYPVDDHHFKVILHYGTLVIDGVTPNMIDYFGRPYEGIAVFDGKKITVTGTLWNGNKIIDERLINPDGSLLFRVTIDV

SEQ ID NO: 1349 - DNA, 474 bp, Artificial Sequence
  Synthetic
gtcttcacactcgaagatttcgttggggactggcgacagacagccggctacaacctggaccaagtccttgaacagggaggtgtgtccagtttgtttcagaatctcggggtgtccgtaactccgatccaaaggattgtcctgagcggtgaaaatgggctgaagatcgacatccatgtcatcatcccgtatgaaggtctgagcggcgaccaaatgggccagatcgaaaaaatttttaaggtggtgtaccctgtggatgatcatcactttaaggtgatcctgcactatggcacactggtaatcgacggggttacgccgaacatgatcgactatttcggacggccgtatgaaggcatcgccgtgttcgacggcaaaaagatcactgtaacagggaccctgtggaacggcaacaaaattatcgacgagcgcctgatcaaccccgacggctccctgctgttccgagtaaccatcagcgtt

SEQ ID NO: 1350 - protein, 158 aa, Artificial Sequence
  Synthetic
VFTLEDFVGDWRQTAGYNLDQVLEQGGVSSLFQNLGVSVTPIQRIVLSGENGLKIDIHVIIPYEGLSGDQMGQIEKIFKVVYPVDDHHFKVILHYGTLVIDGVTPNMIDYFGRPYEGIAVFDGKKITVTGTLWNGNKIIDERLINPDGSLLFRVTISV

SEQ ID NO: 1351 - DNA, 474 bp, Artificial Sequence
  Synthetic
gtcttcacactcgaagatttcgttggggactggcgacagacagccggctacaacctggaccaagtccttgaacagggaggtgtgtccagtttgtttcagaatctcggggtgtccgtaactccgatccaaaggattgtcctgagcggtgaaaatgggctgaagatcgacatccatgtcatcatcccgtatgaaggtctgagcggcgaccaaatgggccagatcgaaaaaatttttaaggtggtgtaccctgtggatgatcatcactttaaggtgatcctgcactatggcacactggtaatcgacggggttacgccgaacatgatcgactatttcggacggccgtatgaaggcatcgccgtgttcgacggcaaaaagatcactgtaacagggaccctgtggaacggcaacaaaattatcgacgagcgcctgatcaaccccgacggctccctgctgttccgagtaaccatcaacgat

SEQ ID NO: 1352 - protein, 158 aa, Artificial Sequence
  Synthetic
VFTLEDFVGDWRQTAGYNLDQVLEQGGVSSLFQNLGVSVTPIQRIVLSGENGLKIDIHVIIPYEGLSGDQMGQIEKIFKVVYPVDDHHFKVILHYGTLVIDGVTPNMIDYFGRPYEGIAVFDGKKITVTGTLWNGNKIIDERLINPDGSLLFRVTIND

SEQ ID NO: 1353 - DNA, 474 bp, Artificial Sequence
  Synthetic
gtcttcacactcgaagatttcgttggggactggcgacagacagccggctacaacctggaccaagtccttgaacagggaggtgtgtccagtttgtttcagaatctcggggtgtccgtaactccgatccaaaggattgtcctgagcggtgaaaatgggctgaagatcgacatccatgtcatcatcccgtatgaaggtctgagcggcgaccaaatgggccagatcgaaaaaatttttaaggtggtgtaccctgtggatgatcatcactttaaggtgatcctgcactatggcacactggtaatcgacggggttacgccgaacatgatcgactatttcggacggccgtatgaaggcatcgccgtgttcgacggcaaaaagatcactgtaacagggaccctgtggaacggcaacaaaattatcgacgagcgcctgatcaaccccgacggctccctgctgttccgagtaaccatcaacagc

SEQ ID NO: 1354 - protein, 158 aa, Artificial Sequence
  Synthetic
VFTLEDFVGDWRQTAGYNLDQVLEQGGVSSLFQNLGVSVTPIQRIVLSGENGLKIDIHVIIPYEGLSGDQMGQIEKIFKVVYPVDDHHFKVILHYGTLVIDGVTPNMIDYFGRPYEGIAVFDGKKITVTGTLWNGNKIIDERLINPDGSLLFRVTINS

SEQ ID NO: 1355 - DNA, 474 bp, Artificial Sequence
  Synthetic
gtcttcacactcgaagatttcgttgccgactggcgacagacagccggctacaacctggaccaagtccttgaacagggaggtgtgtccagtttgtttcagaatctcggggtgtccgtaactccgatccaaaggattgtcctgagcggtgaaaatgggctgaagatcgacatccatgtcatcatcccgtatgaaggtctgagcggcgaccaaatgggccagatcgaaaaaatttttaaggtggtgtaccctgtggatgatcatcactttaaggtgatcctgcactatggcacactggtaatcgacggggttacgccgaacatgatcgactatttcggacggccgtatgaaggcatcgccgtgttcgacggcaaaaagatcactgtaacagggaccctgtggaacggcaacaaaattatcgacgagcgcctgatcaaccccgacggctccctgctgttccgagtaaccatcaacgtt

SEQ ID NO: 1356 - protein, 158 aa, Artificial Sequence
  Synthetic
VFTLEDFVADWRQTAGYNLDQVLEQGGVSSLFQNLGVSVTPIQRIVLSGENGLKIDIHVIIPYEGLSGDQMGQIEKIFKVVYPVDDHHFKVILHYGTLVIDGVTPNMIDYFGRPYEGIAVFDGKKITVTGTLWNGNKIIDERLINPDGSLLFRVTINV

SEQ ID NO: 1357 - DNA, 474 bp, Artificial Sequence
  Synthetic
gtcttcacactcgaagatttcgttggggactggcgacagacagccgcctacaacctggaccaagtccttgaacagggaggtgtgtccagtttgtttcagaatctcggggtgtccgtaactccgatccaaaggattgtcctgagcggtgaaaatgggctgaagatcgacatccatgtcatcatcccgtatgaaggtctgagcggcgaccaaatgggccagatcgaaaaaatttttaaggtggtgtaccctgtggatgatcatcactttaaggtgatcctgcactatggcacactggtaatcgacggggttacgccgaacatgatcgactatttcggacggccgtatgaaggcatcgccgtgttcgacggcaaaaagatcactgtaacagggaccctgtggaacggcaacaaaattatcgacgagcgcctgatcaaccccgacggctccctgctgttccgagtaaccatcaacgtt

SEQ ID NO: 1358 - protein, 158 aa, Artificial Sequence
  Synthetic
VFTLEDFVGDWRQTAAYNLDQVLEQGGVSSLFQNLGVSVTPIQRIVLSGENGLKIDIHVIIPYEGLSGDQMGQIEKIFKVVYPVDDHHFKVILHYGTLVIDGVTPNMIDYFGRPYEGIAVFDGKKITVTGTLWNGNKIIDERLINPDGSLLFRVTINV

SEQ ID NO: 1359 - DNA, 474 bp, Artificial Sequence
  Synthetic
gtcttcacactcgaagatttcgttggggactggcgacagacagccggctacaacctggaccaagtccttgaacaggccggtgtgtccagtttgtttcagaatctcggggtgtccgtaactccgatccaaaggattgtcctgagcggtgaaaatgggctgaagatcgacatccatgtcatcatcccgtatgaaggtctgagcggcgaccaaatgggccagatcgaaaaaatttttaaggtggtgtaccctgtggatgatcatcactttaaggtgatcctgcactatggcacactggtaatcgacggggttacgccgaacatgatcgactatttcggacggccgtatgaaggcatcgccgtgttcgacggcaaaaagatcactgtaacagggaccctgtggaacggcaacaaaattatcgacgagcgcctgatcaaccccgacggctccctgctgttccgagtaaccatcaacgtt

SEQ ID NO: 1360 - protein, 158 aa, Artificial Sequence
  Synthetic
VFTLEDFVGDWRQTAGYNLDQVLEQAGVSSLFQNLGVSVTPIQRIVLSGENGLKIDIHVIIPYEGLSGDQMGQIEKIFKVVYPVDDHHFKVILHYGTLVIDGVTPNMIDYFGRPYEGIAVFDGKKITVTGTLWNGNKIIDERLINPDGSLLFRVTINV

SEQ ID NO: 1361 - DNA, 474 bp, Artificial Sequence
  Synthetic
gtcttcacactcgaagatttcgttggggactggcgacagacagccggctacaacctggaccaagtccttgaacagggagccgtgtccagtttgtttcagaatctcggggtgtccgtaactccgatccaaaggattgtcctgagcggtgaaaatgggctgaagatcgacatccatgtcatcatcccgtatgaaggtctgagcggcgaccaaatgggccagatcgaaaaaatttttaaggtggtgtaccctgtggatgatcatcactttaaggtgatcctgcactatggcacactggtaatcgacggggttacgccgaacatgatcgactatttcggacggccgtatgaaggcatcgccgtgttcgacggcaaaaagatcactgtaacagggaccctgtggaacggcaacaaaattatcgacgagcgcctgatcaaccccgacggctccctgctgttccgagtaaccatcaacgtt

SEQ ID NO: 1362 - protein, 158 aa, Artificial Sequence
  Synthetic
VFTLEDFVGDWRQTAGYNLDQVLEQGAVSSLFQNLGVSVTPIQRIVLSGENGLKIDIHVIIPYEGLSGDQMGQIEKIFKVVYPVDDHHFKVILHYGTLVIDGVTPNMIDYFGRPYEGIAVFDGKKITVTGTLWNGNKIIDERLINPDGSLLFRVTINV

SEQ ID NO: 1363 - DNA, 474 bp, Artificial Sequence
  Synthetic
gtcttcacactcgaagatttcgttggggactggcgacagacagccggctacaacctggaccaagtccttgaacagggaggtgtgtccagtttgtttcagaatctcgccgtgtccgtaactccgatccaaaggattgtcctgagcggtgaaaatgggctgaagatcgacatccatgtcatcatcccgtatgaaggtctgagcggcgaccaaatgggccagatcgaaaaaatttttaaggtggtgtaccctgtggatgatcatcactttaaggtgatcctgcactatggcacactggtaatcgacggggttacgccgaacatgatcgactatttcggacggccgtatgaaggcatcgccgtgttcgacggcaaaaagatcactgtaacagggaccctgtggaacggcaacaaaattatcgacgagcgcctgatcaaccccgacggctccctgctgttccgagtaaccatcaacgtt

SEQ ID NO: 1364 - protein, 158 aa, Artificial Sequence
  Synthetic
VFTLEDFVGDWRQTAGYNLDQVLEQGGVSSLFQNLAVSVTPIQRIVLSGENGLKIDIHVIIPYEGLSGDQMGQIEKIFKVVYPVDDHHFKVILHYGTLVIDGVTPNMIDYFGRPYEGIAVFDGKKITVTGTLWNGNKIIDERLINPDGSLLFRVTINV

SEQ ID NO: 1365 - DNA, 474 bp, Artificial Sequence
  Synthetic
gtcttcacactcgaagatttcgttggggactggcgacagacagccggctacaacctggaccaagtccttgaacagggaggtgtgtccagtttgtttcagaatctcggggtgtccgtaactccgatccaaaggattgtcctgagcgccgaaaatgggctgaagatcgacatccatgtcatcatcccgtatgaaggtctgagcggcgaccaaatgggccagatcgaaaaaatttttaaggtggtgtaccctgtggatgatcatcactttaaggtgatcctgcactatggcacactggtaatcgacggggttacgccgaacatgatcgactatttcggacggccgtatgaaggcatcgccgtgttcgacggcaaaaagatcactgtaacagggaccctgtggaacggcaacaaaattatcgacgagcgcctgatcaaccccgacggctccctgctgttccgagtaaccatcaacgtt

SEQ ID NO: 1366 - protein, 158 aa, Artificial Sequence
  Synthetic
VFTLEDFVGDWRQTAGYNLDQVLEQGGVSSLFQNLGVSVTPIQRIVLSAENGLKIDIHVIIPYEGLSGDQMGQIEKIFKVVYPVDDHHFKVILHYGTLVIDGVTPNMIDYFGRPYEGIAVFDGKKITVTGTLWNGNKIIDERLINPDGSLLFRVTINV

SEQ ID NO: 1367 - DNA, 474 bp, Artificial Sequence
  Synthetic
gtcttcacactcgaagatttcgttggggactggcgacagacagccggctacaacctggaccaagtccttgaacagggaggtgtgtccagtttgtttcagaatctcggggtgtccgtaactccgatccaaaggattgtcctgagcggtgaaaatgccctgaagatcgacatccatgtcatcatcccgtatgaaggtctgagcggcgaccaaatgggccagatcgaaaaaatttttaaggtggtgtaccctgtggatgatcatcactttaaggtgatcctgcactatggcacactggtaatcgacggggttacgccgaacatgatcgactatttcggacggccgtatgaaggcatcgccgtgttcgacggcaaaaagatcactgtaacagggaccctgtggaacggcaacaaaattatcgacgagcgcctgatcaaccccgacggctccctgctgttccgagtaaccatcaacgtt

SEQ ID NO: 1368 - protein, 158 aa, Artificial Sequence
  Synthetic
VFTLEDFVGDWRQTAGYNLDQVLEQGGVSSLFQNLGVSVTPIQRIVLSGENALKIDIHVIIPYEGLSGDQMGQIEKIFKVVYPVDDHHFKVILHYGTLVIDGVTPNMIDYFGRPYEGIAVFDGKKITVTGTLWNGNKIIDERLINPDGSLLFRVTINV

SEQ ID NO: 1369 - DNA, 474 bp, Artificial Sequence
  Synthetic
gtcttcacactcgaagatttcgttggggactggcgacagacagccggctacaacctggaccaagtccttgaacagggaggtgtgtccagtttgtttcagaatctcggggtgtccgtaactccgatccaaaggattgtcctgagcggtgaaaatgggctgaagatcgacatccatgtcatcatcccgtatgaagccctgagcggcgaccaaatgggccagatcgaaaaaatttttaaggtggtgtaccctgtggatgatcatcactttaaggtgatcctgcactatggcacactggtaatcgacggggttacgccgaacatgatcgactatttcggacggccgtatgaaggcatcgccgtgttcgacggcaaaaagatcactgtaacagggaccctgtggaacggcaacaaaattatcgacgagcgcctgatcaaccccgacggctccctgctgttccgagtaaccatcaacgtt

SEQ ID NO: 1370 - protein, 158 aa, Artificial Sequence
  Synthetic
VFTLEDFVGDWRQTAGYNLDQVLEQGGVSSLFQNLGVSVTPIQRIVLSGENGLKIDIHVIIPYEALSGDQMGQIEKIFKVVYPVDDHHFKVILHYGTLVIDGVTPNMIDYFGRPYEGIAVFDGKKITVTGTLWNGNKIIDERLINPDGSLLFRVTINV

SEQ ID NO: 1371 - DNA, 474 bp, Artificial Sequence
  Synthetic
gtcttcacactcgaagatttcgttggggactggcgacagacagccggctacaacctggaccaagtccttgaacagggaggtgtgtccagtttgtttcagaatctcggggtgtccgtaactccgatccaaaggattgtcctgagcggtgaaaatgggctgaagatcgacatccatgtcatcatcccgtatgaaggtctgagcgccgaccaaatgggccagatcgaaaaaatttttaaggtggtgtaccctgtggatgatcatcactttaaggtgatcctgcactatggcacactggtaatcgacggggttacgccgaacatgatcgactatttcggacggccgtatgaaggcatcgccgtgttcgacggcaaaaagatcactgtaacagggaccctgtggaacggcaacaaaattatcgacgagcgcctgatcaaccccgacggctccctgctgttccgagtaaccatcaacgtt

SEQ ID NO: 1372 - protein, 158 aa, Artificial Sequence
  Synthetic
VFTLEDFVGDWRQTAGYNLDQVLEQGGVSSLFQNLGVSVTPIQRIVLSGENGLKIDIHVIIPYEGLSADQMGQIEKIFKVVYPVDDHHFKVILHYGTLVIDGVTPNMIDYFGRPYEGIAVFDGKKITVTGTLWNGNKIIDERLINPDGSLLFRVTINV

SEQ ID NO: 1373 - DNA, 474 bp, Artificial Sequence
  Synthetic
gtcttcacactcgaagatttcgttggggactggcgacagacagccggctacaacctggaccaagtccttgaacagggaggtgtgtccagtttgtttcagaatctcggggtgtccgtaactccgatccaaaggattgtcctgagcggtgaaaatgggctgaagatcgacatccatgtcatcatcccgtatgaaggtctgagcggcgaccaaatggcccagatcgaaaaaatttttaaggtggtgtaccctgtggatgatcatcactttaaggtgatcctgcactatggcacactggtaatcgacggggttacgccgaacatgatcgactatttcggacggccgtatgaaggcatcgccgtgttcgacggcaaaaagatcactgtaacagggaccctgtggaacggcaacaaaattatcgacgagcgcctgatcaaccccgacggctccctgctgttccgagtaaccatcaacgtt

SEQ ID NO: 1374 - protein, 158 aa, Artificial Sequence
  Synthetic
VFTLEDFVGDWRQTAGYNLDQVLEQGGVSSLFQNLGVSVTPIQRIVLSGENGLKIDIHVIIPYEGLSGDQMAQIEKIFKVVYPVDDHHFKVILHYGTLVIDGVTPNMIDYFGRPYEGIAVFDGKKITVTGTLWNGNKIIDERLINPDGSLLFRVTINV

SEQ ID NO: 1375 - DNA, 474 bp, Artificial Sequence
  Synthetic
gtcttcacactcgaagatttcgttggggactggcgacagacagccggctacaacctggaccaagtccttgaacagggaggtgtgtccagtttgtttcagaatctcggggtgtccgtaactccgatccaaaggattgtcctgagcggtgaaaatgggctgaagatcgacatccatgtcatcatcccgtatgaaggtctgagcggcgaccaaatgggccagatcgaaaaaatttttaaggtggtgtaccctgtggatgatcatcactttaaggtgatcctgcactatgccacactggtaatcgacggggttacgccgaacatgatcgactatttcggacggccgtatgaaggcatcgccgtgttcgacggcaaaaagatcactgtaacagggaccctgtggaacggcaacaaaattatcgacgagcgcctgatcaaccccgacggctccctgctgttccgagtaaccatcaacgtt

SEQ ID NO: 1376 - protein, 158 aa, Artificial Sequence
  Synthetic
VFTLEDFVGDWRQTAGYNLDQVLEQGGVSSLFQNLGVSVTPIQRIVLSGENGLKIDIHVIIPYEGLSGDQMGQIEKIFKVVYPVDDHHFKVILHYATLVIDGVTPNMIDYFGRPYEGIAVFDGKKITVTGTLWNGNKIIDERLINPDGSLLFRVTINV

SEQ ID NO: 1377 - DNA, 474 bp, Artificial Sequence
  Synthetic
gtcttcacactcgaagatttcgttggggactggcgacagacagccggctacaacctggaccaagtccttgaacagggaggtgtgtccagtttgtttcagaatctcggggtgtccgtaactccgatccaaaggattgtcctgagcggtgaaaatgggctgaagatcgacatccatgtcatcatcccgtatgaaggtctgagcggcgaccaaatgggccagatcgaaaaaatttttaaggtggtgtaccctgtggatgatcatcactttaaggtgatcctgcactatggcacactggtaatcgacgccgttacgccgaacatgatcgactatttcggacggccgtatgaaggcatcgccgtgttcgacggcaaaaagatcactgtaacagggaccctgtggaacggcaacaaaattatcgacgagcgcctgatcaaccccgacggctccctgctgttccgagtaaccatcaacgtt

SEQ ID NO: 1378 - protein, 158 aa, Artificial Sequence
  Synthetic
VFTLEDFVGDWRQTAGYNLDQVLEQGGVSSLFQNLGVSVTPIQRIVLSGENGLKIDIHVIIPYEGLSGDQMGQIEKIFKVVYPVDDHHFKVILHYGTLVIDAVTPNMIDYFGRPYEGIAVFDGKKITVTGTLWNGNKIIDERLINPDGSLLFRVTINV

SEQ ID NO: 1379 - DNA, 474 bp, Artificial Sequence
  Synthetic
gtcttcacactcgaagatttcgttggggactggcgacagacagccggctacaacctggaccaagtccttgaacagggaggtgtgtccagtttgtttcagaatctcggggtgtccgtaactccgatccaaaggattgtcctgagcggtgaaaatgggctgaagatcgacatccatgtcatcatcccgtatgaaggtctgagcggcgaccaaatgggccagatcgaaaaaatttttaaggtggtgtaccctgtggatgatcatcactttaaggtgatcctgcactatggcacactggtaatcgacggggttacgccgaacatgatcgactatttcgcccggccgtatgaaggcatcgccgtgttcgacggcaaaaagatcactgtaacagggaccctgtggaacggcaacaaaattatcgacgagcgcctgatcaaccccgacggctccctgctgttccgagtaaccatcaacgtt

SEQ ID NO: 1380 - protein, 158 aa, Artificial Sequence
  Synthetic
VFTLEDFVGDWRQTAGYNLDQVLEQGGVSSLFQNLGVSVTPIQRIVLSGENGLKIDIHVIIPYEGLSGDQMGQIEKIFKVVYPVDDHHFKVILHYGTLVIDGVTPNMIDYFARPYEGIAVFDGKKITVTGTLWNGNKIIDERLINPDGSLLFRVTINV

SEQ ID NO: 1381 - DNA, 474 bp, Artificial Sequence
  Synthetic
gtcttcacactcgaagatttcgttggggactggcgacagacagccggctacaacctggaccaagtccttgaacagggaggtgtgtccagtttgtttcagaatctcggggtgtccgtaactccgatccaaaggattgtcctgagcggtgaaaatgggctgaagatcgacatccatgtcatcatcccgtatgaaggtctgagcggcgaccaaatgggccagatcgaaaaaatttttaaggtggtgtaccctgtggatgatcatcactttaaggtgatcctgcactatggcacactggtaatcgacggggttacgccgaacatgatcgactatttcggacggccgtatgaagccatcgccgtgttcgacggcaaaaagatcactgtaacagggaccctgtggaacggcaacaaaattatcgacgagcgcctgatcaaccccgacggctccctgctgttccgagtaaccatcaacgtt

SEQ ID NO: 1382 - protein, 158 aa, Artificial Sequence
  Synthetic
VFTLEDFVGDWRQTAGYNLDQVLEQGGVSSLFQNLGVSVTPIQRIVLSGENGLKIDIHVIIPYEGLSGDQMGQIEKIFKVVYPVDDHHFKVILHYGTLVIDGVTPNMIDYFGRPYEAIAVFDGKKITVTGTLWNGNKIIDERLINPDGSLLFRVTINV

SEQ ID NO: 1383 - DNA, 474 bp, Artificial Sequence
  Synthetic
gtcttcacactcgaagatttcgttggggactggcgacagacagccggctacaacctggaccaagtccttgaacagggaggtgtgtccagtttgtttcagaatctcggggtgtccgtaactccgatccaaaggattgtcctgagcggtgaaaatgggctgaagatcgacatccatgtcatcatcccgtatgaaggtctgagcggcgaccaaatgggccagatcgaaaaaatttttaaggtggtgtaccctgtggatgatcatcactttaaggtgatcctgcactatggcacactggtaatcgacggggttacgccgaacatgatcgactatttcggacggccgtatgaaggcatcgccgtgttcgacgccaaaaagatcactgtaacagggaccctgtggaacggcaacaaaattatcgacgagcgcctgatcaaccccgacggctccctgctgttccgagtaaccatcaacgtt

SEQ ID NO: 1384 - protein, 158 aa, Artificial Sequence
  Synthetic
VFTLEDFVGDWRQTAGYNLDQVLEQGGVSSLFQNLGVSVTPIQRIVLSGENGLKIDIHVIIPYEGLSGDQMGQIEKIFKVVYPVDDHHFKVILHYGTLVIDGVTPNMIDYFGRPYEGIAVFDAKKITVTGTLWNGNKIIDERLINPDGSLLFRVTINV

SEQ ID NO: 1385 - DNA, 474 bp, Artificial Sequence
  Synthetic
gtcttcacactcgaagatttcgttggggactggcgacagacagccggctacaacctggaccaagtccttgaacagggaggtgtgtccagtttgtttcagaatctcggggtgtccgtaactccgatccaaaggattgtcctgagcggtgaaaatgggctgaagatcgacatccatgtcatcatcccgtatgaaggtctgagcggcgaccaaatgggccagatcgaaaaaatttttaaggtggtgtaccctgtggatgatcatcactttaaggtgatcctgcactatggcacactggtaatcgacggggttacgccgaacatgatcgactatttcggacggccgtatgaaggcatcgccgtgttcgacggcaaaaagatcactgtaacagccaccctgtggaacggcaacaaaattatcgacgagcgcctgatcaaccccgacggctccctgctgttccgagtaaccatcaacgtt

SEQ ID NO: 1386 - protein, 158 aa, Artificial Sequence
  Synthetic
VFTLEDFVGDWRQTAGYNLDQVLEQGGVSSLFQNLGVSVTPIQRIVLSGENGLKIDIHVIIPYEGLSGDQMGQIEKIFKVVYPVDDHHFKVILHYGTLVIDGVTPNMIDYFGRPYEGIAVFDGKKITVTATLWNGNKIIDERLINPDGSLLFRVTINV

SEQ ID NO: 1387 - DNA, 474 bp, Artificial Sequence
  Synthetic
gtcttcacactcgaagatttcgttggggactggcgacagacagccggctacaacctggaccaagtccttgaacagggaggtgtgtccagtttgtttcagaatctcggggtgtccgtaactccgatccaaaggattgtcctgagcggtgaaaatgggctgaagatcgacatccatgtcatcatcccgtatgaaggtctgagcggcgaccaaatgggccagatcgaaaaaatttttaaggtggtgtaccctgtggatgatcatcactttaaggtgatcctgcactatggcacactggtaatcgacggggttacgccgaacatgatcgactatttcggacggccgtatgaaggcatcgccgtgttcgacggcaaaaagatcactgtaacagggaccctgtggaacgccaacaaaattatcgacgagcgcctgatcaaccccgacggctccctgctgttccgagtaaccatcaacgtt

SEQ ID NO: 1388 - protein, 158 aa, Artificial Sequence
  Synthetic
VFTLEDFVGDWRQTAGYNLDQVLEQGGVSSLFQNLGVSVTPIQRIVLSGENGLKIDIHVIIPYEGLSGDQMGQIEKIFKVVYPVDDHHFKVILHYGTLVIDGVTPNMIDYFGRPYEGIAVFDGKKITVTGTLWNANKIIDERLINPDGSLLFRVTINV

SEQ ID NO: 1389 - DNA, 474 bp, Artificial Sequence
  Synthetic
gtcttcacactcgaagatttcgttggggactggcgacagacagccggctacaacctggaccaagtccttgaacagggaggtgtgtccagtttgtttcagaatctcggggtgtccgtaactccgatccaaaggattgtcctgagcggtgaaaatgggctgaagatcgacatccatgtcatcatcccgtatgaaggtctgagcggcgaccaaatgggccagatcgaaaaaatttttaaggtggtgtaccctgtggatgatcatcactttaaggtgatcctgcactatggcacactggtaatcgacggggttacgccgaacatgatcgactatttcggacggccgtatgaaggcatcgccgtgttcgacggcaaaaagatcactgtaacagggaccctgtggaacggcaacaaaattatcgacgagcgcctgatcaaccccgacgcctccctgctgttccgagtaaccatcaacgtt

SEQ ID NO: 1390 - protein, 158 aa, Artificial Sequence
  Synthetic
VFTLEDFVGDWRQTAGYNLDQVLEQGGVSSLFQNLGVSVTPIQRIVLSGENGLKIDIHVIIPYEGLSGDQMGQIEKIFKVVYPVDDHHFKVILHYGTLVIDGVTPNMIDYFGRPYEGIAVFDGKKITVTGTLWNGNKIIDERLINPDASLLFRVTINV

SEQ ID NO: 1391 - DNA, 474 bp, Artificial Sequence
  Synthetic
gtcttcacactcgaagatttcgttggggactggcgacagacagccggctacaacctggaccaagtccttgaacagggaggtgtgtccagtttgtttcagaatctcggggtgtccgtaactccgatccaaaggattgtcctgagcggtgaaaatgggctgaaggccgacatccatgtcatcatcccgtatgaaggtctgagcggcgaccaaatgggccagatcgaaaaaatttttaaggtggtgtaccctgtggatgatcatcactttaaggtgatcctgcactatggcacactggtaatcgacggggttacgccgaacatgatcgactatttcggacggccgtatgaaggcatcgccgtgttcgacggcaaaaagatcactgtaacagggaccctgtggaacggcaacaaaattatcgacgagcgcctgatcaaccccgacggctccctgctgttccgagtaaccatcaacgtt

SEQ ID NO: 1392 - protein, 158 aa, Artificial Sequence
  Synthetic
VFTLEDFVGDWRQTAGYNLDQVLEQGGVSSLFQNLGVSVTPIQRIVLSGENGLKADIHVIIPYEGLSGDQMGQIEKIFKVVYPVDDHHFKVILHYGTLVIDGVTPNMIDYFGRPYEGIAVFDGKKITVTGTLWNGNKIIDERLINPDGSLLFRVTINV

SEQ ID NO: 1393 - DNA, 474 bp, Artificial Sequence
  Synthetic
gtcttcacactcgaagatttcgttggggactggcgacagacagccgcctacaacctggcccaagtccttgaacagggaggtgtgtccagtttgtttcagaatctcgccgtgtccgtaactccgatccaaaggattgtcctgagcggtgaaaatgccctgaagatcgacatccatgtcatcatcccgtatgaaggtctgagcgccgaccaaatgggccagatcgaaaaaatttttaaggtggtgtaccctgtggatgatcatcactttaaggtgatcctgcactatggcacactggtaatcgacggggttacgccgaacatgatcgactatttcggacggccgtatgaaggcatcgccgtgttcgacggcaaaaagatcactgtaacagggaccctgtggaacggcaacaaaattatcgacgagcgcctgatcaaccccgacggctccctgctgttccgagtaaccatcaacgtt

SEQ ID NO: 1394 - protein, 158 aa, Artificial Sequence
  Synthetic
VFTLEDFVGDWRQTAAYNLAQVLEQGGVSSLFQNLAVSVTPIQRIVLSGENALKIDIHVIIPYEGLSADQMGQIEKIFKVVYPVDDHHFKVILHYGTLVIDGVTPNMIDYFGRPYEGIAVFDGKKITVTGTLWNGNKIIDERLINPDGSLLFRVTINV

SEQ ID NO: 1395 - DNA, 474 bp, Artificial Sequence
  Synthetic
gtcttcacactcgaagatttcgttggggactggcgacagacagccgcctacaacctggaccaagtccttgaacagggaggtgtgtccagtttgtttcagaatctcgccgtgtccgtaactccgatccaaaggattgtcctgagcggtgaaaatgggctgaagatcgacatccatgtcatcatcccgtatgaaggtctgagcgccgaccaaatggcccagatcgaaaaaatttttaaggtggtgtaccctgtggatgatcatcactttaaggtgatcctgcactatggcacactggtaatcgacggggttacgccgaacatgatcgactatttcggacggccgtatgaaggcatcgccgtgttcgacggcaaaaagatcactgtaacagggaccctgtggaacggcaacaaaattatcgacgagcgcctgatcaaccccgacggctccctgctgttccgagtaaccatcaacgtt

SEQ ID NO: 1396 - protein, 158 aa, Artificial Sequence
  Synthetic
VFTLEDFVGDWRQTAAYNLDQVLEQGGVSSLFQNLAVSVTPIQRIVLSGENGLKIDIHVIIPYEGLSADQMAQIEKIFKVVYPVDDHHFKVILHYGTLVIDGVTPNMIDYFGRPYEGIAVFDGKKITVTGTLWNGNKIIDERLINPDGSLLFRVTINV

SEQ ID NO: 1397 - DNA, 474 bp, Artificial Sequence
  Synthetic
gtcttcacactcgaagatttcgttggggactggcgacagacagccgcctacaacctggaccaagtccttgaacagggaggtgtgtccagtttgtttcagaatctcgccgtgtccgtaactccgatccaaaggattgtcctgagcggtgaaaatgccctgaagatcgacatccatgtcatcatcccgtatgaaggtctgagcgccgaccaaatggcccagatcgaaaaaatttttaaggtggtgtaccctgtggatgatcatcactttaaggtgatcctgcactatggcacactggtaatcgacggggttacgccgaacatgatcgactatttcggacggccgtatgaaggcatcgccgtgttcgacggcaaaaagatcactgtaacagggaccctgtggaacggcaacaaaattatcgacgagcgcctgatcaaccccgacggctccctgctgttccgagtaaccatcaacgtt

SEQ ID NO: 1398 - protein, 158 aa, Artificial Sequence
  Synthetic
VFTLEDFVGDWRQTAAYNLDQVLEQGGVSSLFQNLAVSVTPIQRIVLSGENALKIDIHVIIPYEGLSADQMAQIEKIFKVVYPVDDHHFKVILHYGTLVIDGVTPNMIDYFGRPYEGIAVFDGKKITVTGTLWNGNKIIDERLINPDGSLLFRVTINV

SEQ ID NO: 1399 - DNA, 474 bp, Artificial Sequence
  Synthetic
gtcttcacactcgaagatttcgttggggactggcgacagacagccggctacaacctggaccaagtccttgaacagggaggtgtgtccagtttgtttcagaatctcgccgtgtccgtaactccgatccaaaggattgtcctgagcggtgaaaatgccctgaagatcgacatccatgtcatcatcccgtatgaaggtctgagcgccgaccaaatggcccagatcgaaaaaatttttaaggtggtgtaccctgtggatgatcatcactttaaggtgatcctgcactatggcacactggtaatcgacggggttacgccgaacatgatcgactatttcggacggccgtatgaaggcatcgccgtgttcgacggcaaaaagatcactgtaacagggaccctgtggaacggcaacaaaattatcgacgagcgcctgatcaaccccgacggctccctgctgttccgagtaaccatcaacgtt

SEQ ID NO: 1400 - protein, 158 aa, Artificial Sequence
  Synthetic
VFTLEDFVGDWRQTAGYNLDQVLEQGGVSSLFQNLAVSVTPIQRIVLSGENALKIDIHVIIPYEGLSADQMAQIEKIFKVVYPVDDHHFKVILHYGTLVIDGVTPNMIDYFGRPYEGIAVFDGKKITVTGTLWNGNKIIDERLINPDGSLLFRVTINV

SEQ ID NO: 1401 - DNA, 474 bp, Artificial Sequence
  Synthetic
gtcttcacactcgaagatttcgttggggactggcgacagacagccgcctacaacctggaccaagtccttgaacagggaggtgtgtccagtttgtttcagaatctcggggtgtccgtaactccgatccaaaggattgtcctgagcggtgaaaatgccctgaagatcgacatccatgtcatcatcccgtatgaaggtctgagcgccgaccaaatggcccagatcgaaaaaatttttaaggtggtgtaccctgtggatgatcatcactttaaggtgatcctgcactatggcacactggtaatcgacggggttacgccgaacatgatcgactatttcggacggccgtatgaaggcatcgccgtgttcgacggcaaaaagatcactgtaacagggaccctgtggaacggcaacaaaattatcgacgagcgcctgatcaaccccgacggctccctgctgttccgagtaaccatcaacgtt

SEQ ID NO: 1402 - protein, 158 aa, Artificial Sequence
  Synthetic
VFTLEDFVGDWRQTAAYNLDQVLEQGGVSSLFQNLGVSVTPIQRIVLSGENALKIDIHVIIPYEGLSADQMAQIEKIFKVVYPVDDHHFKVILHYGTLVIDGVTPNMIDYFGRPYEGIAVFDGKKITVTGTLWNGNKIIDERLINPDGSLLFRVTINV

SEQ ID NO: 1403 - DNA, 474 bp, Artificial Sequence; identical to SEQ ID NO: 1395
  Synthetic

SEQ ID NO: 1404 - protein, 158 aa, Artificial Sequence; identical to SEQ ID NO: 1396
  Synthetic

SEQ ID NO: 1405 - DNA, 474 bp, Artificial Sequence
  Synthetic
gtcttcacactcgaagatttcgttggggactggcgacagacagccgcctacaacctggaccaagtccttgaacagggaggtgtgtccagtttgtttcagaatctcgccgtgtccgtaactccgatccaaaggattgtcctgagcggtgaaaatgccctgaagatcgacatccatgtcatcatcccgtatgaaggtctgagcggcgaccaaatggcccagatcgaaaaaatttttaaggtggtgtaccctgtggatgatcatcactttaaggtgatcctgcactatggcacactggtaatcgacggggttacgccgaacatgatcgactatttcggacggccgtatgaaggcatcgccgtgttcgacggcaaaaagatcactgtaacagggaccctgtggaacggcaacaaaattatcgacgagcgcctgatcaaccccgacggctccctgctgttccgagtaaccatcaacgtt

SEQ ID NO: 1406 - protein, 158 aa, Artificial Sequence
  Synthetic
VFTLEDFVGDWRQTAAYNLDQVLEQGGVSSLFQNLAVSVTPIQRIVLSGENALKIDIHVIIPYEGLSGDQMAQIEKIFKVVYPVDDHHFKVILHYGTLVIDGVTPNMIDYFGRPYEGIAVFDGKKITVTGTLWNGNKIIDERLINPDGSLLFRVTINV

SEQ ID NO: 1407 - DNA, 474 bp, Artificial Sequence
  Synthetic
gtcttcacactcgaagatttcgttggggactggcgacagacagccgcctacaacctggaccaagtccttgaacagggaggtgtgtccagtttgtttcagaatctcgccgtgtccgtaactccgatccaaaggattgtcctgagcggtgaaaatgccctgaagatcgacatccatgtcatcatcccgtatgaaggtctgagcgccgaccaaatgggccagatcgaaaaaatttttaaggtggtgtaccctgtggatgatcatcactttaaggtgatcctgcactatggcacactggtaatcgacggggttacgccgaacatgatcgactatttcggacggccgtatgaaggcatcgccgtgttcgacggcaaaaagatcactgtaacagggaccctgtggaacggcaacaaaattatcgacgagcgcctgatcaaccccgacggctccctgctgttccgagtaaccatcaacgtt

SEQ ID NO: 1408 - protein, 158 aa, Artificial Sequence
  Synthetic
VFTLEDFVGDWRQTAAYNLDQVLEQGGVSSLFQNLAVSVTPIQRIVLSGENALKIDIHVIIPYEGLSADQMGQIEKIFKVVYPVDDHHFKVILHYGTLVIDGVTPNMIDYFGRPYEGIAVFDGKKITVTGTLWNGNKIIDERLINPDGSLLFRVTINV

SEQ ID NO: 1409 - DNA, 474 bp, Artificial Sequence
  Synthetic
gtcttcacactcgaagatttcgttggggactgggcccagacagccgcctacaacctggaccaagtccttgaacagggaggtgtgtccagtttgtttcagaatctcgccgtgtccgtaactccgatccaaaggattgtcctgagcggtgaaaatgccctgaagatcgacatccatgtcatcatcccgtatgaaggtctgagcgccgaccaaatggcccagatcgaaaaaatttttaaggtggtgtaccctgtggatgatcatcactttaaggtgatcctgcactatggcacactggtaatcgacggggttacgccgaacatgatcgactatttcggacggccgtatgaaggcatcgccgtgttcgacggcaaaaagatcactgtaacagggaccctgtggaacggcaacaaaattatcgacgagcgcctgatcaaccccgacggctccctgctgttccgagtaaccatcaacgtt

SEQ ID NO: 1410 - protein, 158 aa, Artificial Sequence
  Synthetic
VFTLEDFVGDWAQTAAYNLDQVLEQGGVSSLFQNLAVSVTPIQRIVLSGENALKIDIHVIIPYEGLSADQMAQIEKIFKVVYPVDDHHFKVILHYGTLVIDGVTPNMIDYFGRPYEGIAVFDGKKITVTGTLWNGNKIIDERLINPDGSLLFRVTINV

SEQ ID NO: 1411 - DNA, 474 bp, Artificial Sequence
  Synthetic
gtcttcacactcgaagatttcgttggggactggtgccagacagccgcctacaacctggaccaagtccttgaacagggaggtgtgtccagtttgtttcagaatctcgccgtgtccgtaactccgatccaaaggattgtcctgagcggtgaaaatgccctgaagatcgacatccatgtcatcatcccgtatgaaggtctgagcgccgaccaaatggcccagatcgaaaaaatttttaaggtggtgtaccctgtggatgatcatcactttaaggtgatcctgcactatggcacactggtaatcgacggggttacgccgaacatgatcgactatttcggacggccgtatgaaggcatcgccgtgttcgacggcaaaaagatcactgtaacagggaccctgtggaacggcaacaaaattatcgacgagcgcctgatcaaccccgacggctccctgctgttccgagtaaccatcaacgtt

SEQ ID NO: 1412 - protein, 158 aa, Artificial Sequence
  Synthetic
VFTLEDFVGDWCQTAAYNLDQVLEQGGVSSLFQNLAVSVTPIQRIVLSGENALKIDIHVIIPYEGLSADQMAQIEKIFKVVYPVDDHHFKVILHYGTLVIDGVTPNMIDYFGRPYEGIAVFDGKKITVTGTLWNGNKIIDERLINPDGSLLFRVTINV

SEQ ID NO: 1413 - DNA, 474 bp, Artificial Sequence
  Synthetic
gtcttcacactcgaagatttcgttggggactgggaccagacagccgcctacaacctggaccaagtccttgaacagggaggtgtgtccagtttgtttcagaatctcgccgtgtccgtaactccgatccaaaggattgtcctgagcggtgaaaatgccctgaagatcgacatccatgtcatcatcccgtatgaaggtctgagcgccgaccaaatggcccagatcgaaaaaatttttaaggtggtgtaccctgtggatgatcatcactttaaggtgatcctgcactatggcacactggtaatcgacggggttacgccgaacatgatcgactatttcggacggccgtatgaaggcatcgccgtgttcgacggcaaaaagatcactgtaacagggaccctgtggaacggcaacaaaattatcgacgagcgcctgatcaaccccgacggctccctgctgttccgagtaaccatcaacgtt

SEQ ID NO: 1414 - protein, 158 aa, Artificial Sequence
  Synthetic
VFTLEDFVGDWDQTAAYNLDQVLEQGGVSSLFQNLAVSVTPIQRIVLSGENALKIDIHVIIPYEGLSADQMAQIEKIFKVVYPVDDHHFKVILHYGTLVIDGVTPNMIDYFGRPYEGIAVFDGKKITVTGTLWNGNKIIDERLINPDGSLLFRVTINV

SEQ ID NO: 1415 - DNA, 474 bp, Artificial Sequence
  Synthetic
gtcttcacactcgaagatttcgttggggactgggagcagacagccgcctacaacctggaccaagtccttgaacagggaggtgtgtccagtttgtttcagaatctcgccgtgtccgtaactccgatccaaaggattgtcctgagcggtgaaaatgccctgaagatcgacatccatgtcatcatcccgtatgaaggtctgagcgccgaccaaatggcccagatcgaaaaaatttttaaggtggtgtaccctgtggatgatcatcactttaaggtgatcctgcactatggcacactggtaatcgacggggttacgccgaacatgatcgactatttcggacggccgtatgaaggcatcgccgtgttcgacggcaaaaagatcactgtaacagggaccctgtggaacggcaacaaaattatcgacgagcgcctgatcaaccccgacggctccctgctgttccgagtaaccatcaacgtt

SEQ ID NO: 1416 - protein, 158 aa, Artificial Sequence
  Synthetic
VFTLEDFVGDWEQTAAYNLDQVLEQGGVSSLFQNLAVSVTPIQRIVLSGENALKIDIHVIIPYEGLSADQMAQIEKIFKVVYPVDDHHFKVILHYGTLVIDGVTPNMIDYFGRPYEGIAVFDGKKITVTGTLWNGNKIIDERLINPDGSLLFRVTINV

SEQ ID NO: 1417 - DNA, 474 bp, Artificial Sequence
  Synthetic
gtcttcacactcgaagatttcgttggggactggttccagacagccgcctacaacctggaccaagtccttgaacagggaggtgtgtccagtttgtttcagaatctcgccgtgtccgtaactccgatccaaaggattgtcctgagcggtgaaaatgccctgaagatcgacatccatgtcatcatcccgtatgaaggtctgagcgccgaccaaatggcccagatcgaaaaaatttttaaggtggtgtaccctgtggatgatcatcactttaaggtgatcctgcactatggcacactggtaatcgacggggttacgccgaacatgatcgactatttcggacggccgtatgaaggcatcgccgtgttcgacggcaaaaagatcactgtaacagggaccctgtggaacggcaacaaaattatcgacgagcgcctgatcaaccccgacggctccctgctgttccgagtaaccatcaacgtt

SEQ ID NO: 1418 - protein, 158 aa, Artificial Sequence
  Synthetic
VFTLEDFVGDWFQTAAYNLDQVLEQGGVSSLFQNLAVSVTPIQRIVLSGENALKIDIHVIIPYEGLSADQMAQIEKIFKVVYPVDDHHFKVILHYGTLVIDGVTPNMIDYFGRPYEGIAVFDGKKITVTGTLWNGNKIIDERLINPDGSLLFRVTINV

SEQ ID NO: 1419 - DNA, 474 bp, Artificial Sequence
  Synthetic
gtcttcacactcgaagatttcgttggggactggggccagacagccgcctacaacctggaccaagtccttgaacagggaggtgtgtccagtttgtttcagaatctcgccgtgtccgtaactccgatccaaaggattgtcctgagcggtgaaaatgccctgaagatcgacatccatgtcatcatcccgtatgaaggtctgagcgccgaccaaatggcccagatcgaaaaaatttttaaggtggtgtaccctgtggatgatcatcactttaaggtgatcctgcactatggcacactggtaatcgacggggttacgccgaacatgatcgactatttcggacggccgtatgaaggcatcgccgtgttcgacggcaaaaagatcactgtaacagggaccctgtggaacggcaacaaaattatcgacgagcgcctgatcaaccccgacggctccctgctgttccgagtaaccatcaacgtt

SEQ ID NO: 1420 - protein, 158 aa, Artificial Sequence
  Synthetic
VFTLEDFVGDWGQTAAYNLDQVLEQGGVSSLFQNLAVSVTPIQRIVLSGENALKIDIHVIIPYEGLSADQMAQIEKIFKVVYPVDDHHFKVILHYGTLVIDGVTPNMIDYFGRPYEGIAVFDGKKITVTGTLWNGNKIIDERLINPDGSLLFRVTINV

SEQ ID NO: 1421 - DNA, 474 bp, Artificial Sequence
  Synthetic
gtcttcacactcgaagatttcgttggggactggcaccagacagccgcctacaacctggaccaagtccttgaacagggaggtgtgtccagtttgtttcagaatctcgccgtgtccgtaactccgatccaaaggattgtcctgagcggtgaaaatgccctgaagatcgacatccatgtcatcatcccgtatgaaggtctgagcgccgaccaaatggcccagatcgaaaaaatttttaaggtggtgtaccctgtggatgatcatcactttaaggtgatcctgcactatggcacactggtaatcgacggggttacgccgaacatgatcgactatttcggacggccgtatgaaggcatcgccgtgttcgacggcaaaaagatcactgtaacagggaccctgtggaacggcaacaaaattatcgacgagcgcctgatcaaccccgacggctccctgctgttccgagtaaccatcaacgtt

SEQ ID NO: 1422 - protein, 158 aa, Artificial Sequence
  Synthetic
VFTLEDFVGDWHQTAAYNLDQVLEQGGVSSLFQNLAVSVTPIQRIVLSGENALKIDIHVIIPYEGLSADQMAQIEKIFKVVYPVDDHHFKVILHYGTLVIDGVTPNMIDYFGRPYEGIAVFDGKKITVTGTLWNGNKIIDERLINPDGSLLFRVTINV

SEQ ID NO: 1423 - DNA, 474 bp, Artificial Sequence
  Synthetic
gtcttcacactcgaagatttcgttggggactggatccagacagccgcctacaacctggaccaagtccttgaacagggaggtgtgtccagtttgtttcagaatctcgccgtgtccgtaactccgatccaaaggattgtcctgagcggtgaaaatgccctgaagatcgacatccatgtcatcatcccgtatgaaggtctgagcgccgaccaaatggcccagatcgaaaaaatttttaaggtggtgtaccctgtggatgatcatcactttaaggtgatcctgcactatggcacactggtaatcgacggggttacgccgaacatgatcgactatttcggacggccgtatgaaggcatcgccgtgttcgacggcaaaaagatcactgtaacagggaccctgtggaacggcaacaaaattatcgacgagcgcctgatcaaccccgacggctccctgctgttccgagtaaccatcaacgtt

SEQ ID NO: 1424 - protein, 158 aa, Artificial Sequence
  Synthetic
VFTLEDFVGDWIQTAAYNLDQVLEQGGVSSLFQNLAVSVTPIQRIVLSGENALKIDIHVIIPYEGLSADQMAQIEKIFKVVYPVDDHHFKVILHYGTLVIDGVTPNMIDYFGRPYEGIAVFDGKKITVTGTLWNGNKIIDERLINPDGSLLFRVTINV

SEQ ID NO: 1425 - DNA, 474 bp, Artificial Sequence
  Synthetic
gtcttcacactcgaagatttcgttggggactggaagcagacagccgcctacaacctggaccaagtccttgaacagggaggtgtgtccagtttgtttcagaatctcgccgtgtccgtaactccgatccaaaggattgtcctgagcggtgaaaatgccctgaagatcgacatccatgtcatcatcccgtatgaaggtctgagcgccgaccaaatggcccagatcgaaaaaatttttaaggtggtgtaccctgtggatgatcatcactttaaggtgatcctgcactatggcacactggtaatcgacggggttacgccgaacatgatcgactatttcggacggccgtatgaaggcatcgccgtgttcgacggcaaaaagatcactgtaacagggaccctgtggaacggcaacaaaattatcgacgagcgcctgatcaaccccgacggctccctgctgttccgagtaaccatcaacgtt

SEQ ID NO: 1426 - protein, 158 aa, Artificial Sequence
  Synthetic
VFTLEDFVGDWKQTAAYNLDQVLEQGGVSSLFQNLAVSVTPIQRIVLSGENALKIDIHVIIPYEGLSADQMAQIEKIFKVVYPVDDHHFKVILHYGTLVIDGVTPNMIDYFGRPYEGIAVFDGKKITVTGTLWNGNKIIDERLINPDGSLLFRVTINV

SEQ ID NO: 1427 - DNA, 474 bp, Artificial Sequence
  Synthetic
gtcttcacactcgaagatttcgttggggactggctgcagacagccgcctacaacctggaccaagtccttgaacagggaggtgtgtccagtttgtttcagaatctcgccgtgtccgtaactccgatccaaaggattgtcctgagcggtgaaaatgccctgaagatcgacatccatgtcatcatcccgtatgaaggtctgagcgccgaccaaatggcccagatcgaaaaaatttttaaggtggtgtaccctgtggatgatcatcactttaaggtgatcctgcactatggcacactggtaatcgacggggttacgccgaacatgatcgactatttcggacggccgtatgaaggcatcgccgtgttcgacggcaaaaagatcactgtaacagggaccctgtggaacggcaacaaaattatcgacgagcgcctgatcaaccccgacggctccctgctgttccgagtaaccatcaacgtt

SEQ ID NO: 1428 - protein, 158 aa, Artificial Sequence
  Synthetic
VFTLEDFVGDWLQTAAYNLDQVLEQGGVSSLFQNLAVSVTPIQRIVLSGENALKIDIHVIIPYEGLSADQMAQIEKIFKVVYPVDDHHFKVILHYGTLVIDGVTPNMIDYFGRPYEGIAVFDGKKITVTGTLWNGNKIIDERLINPDGSLLFRVTINV

SEQ ID NO: 1429 - DNA, 474 bp, Artificial Sequence
  Synthetic
gtcttcacactcgaagatttcgttggggactggatgcagacagccgcctacaacctggaccaagtccttgaacagggaggtgtgtccagtttgtttcagaatctcgccgtgtccgtaactccgatccaaaggattgtcctgagcggtgaaaatgccctgaagatcgacatccatgtcatcatcccgtatgaaggtctgagcgccgaccaaatggcccagatcgaaaaaatttttaaggtggtgtaccctgtggatgatcatcactttaaggtgatcctgcactatggcacactggtaatcgacggggttacgccgaacatgatcgactatttcggacggccgtatgaaggcatcgccgtgttcgacggcaaaaagatcactgtaacagggaccctgtggaacggcaacaaaattatcgacgagcgcctgatcaaccccgacggctccctgctgttccgagtaaccatcaacgtt

SEQ ID NO: 1430 - protein, 158 aa, Artificial Sequence
  Synthetic
VFTLEDFVGDWMQTAAYNLDQVLEQGGVSSLFQNLAVSVTPIQRIVLSGENALKIDIHVIIPYEGLSADQMAQIEKIFKVVYPVDDHHFKVILHYGTLVIDGVTPNMIDYFGRPYEGIAVFDGKKITVTGTLWNGNKIIDERLINPDGSLLFRVTINV

SEQ ID NO: 1431 - DNA, 474 bp, Artificial Sequence
  Synthetic
gtcttcacactcgaagatttcgttggggactggaaccagacagccgcctacaacctggaccaagtccttgaacagggaggtgtgtccagtttgtttcagaatctcgccgtgtccgtaactccgatccaaaggattgtcctgagcggtgaaaatgccctgaagatcgacatccatgtcatcatcccgtatgaaggtctgagcgccgaccaaatggcccagatcgaaaaaatttttaaggtggtgtaccctgtggatgatcatcactttaaggtgatcctgcactatggcacactggtaatcgacggggttacgccgaacatgatcgactatttcggacggccgtatgaaggcatcgccgtgttcgacggcaaaaagatcactgtaacagggaccctgtggaacggcaacaaaattatcgacgagcgcctgatcaaccccgacggctccctgctgttccgagtaaccatcaacgtt

SEQ ID NO: 1432 - protein, 158 aa, Artificial Sequence
  Synthetic
VFTLEDFVGDWNQTAAYNLDQVLEQGGVSSLFQNLAVSVTPIQRIVLSGENALKIDIHVIIPYEGLSADQMAQIEKIFKVVYPVDDHHFKVILHYGTLVIDGVTPNMIDYFGRPYEGIAVFDGKKITVTGTLWNGNKIIDERLINPDGSLLFRVTINV

SEQ ID NO: 1433 - DNA, 474 bp, Artificial Sequence
  Synthetic
gtcttcacactcgaagatttcgttggggactggccccagacagccgcctacaacctggaccaagtccttgaacagggaggtgtgtccagtttgtttcagaatctcgccgtgtccgtaactccgatccaaaggattgtcctgagcggtgaaaatgccctgaagatcgacatccatgtcatcatcccgtatgaaggtctgagcgccgaccaaatggcccagatcgaaaaaatttttaaggtggtgtaccctgtggatgatcatcactttaaggtgatcctgcactatggcacactggtaatcgacggggttacgccgaacatgatcgactatttcggacggccgtatgaaggcatcgccgtgttcgacggcaaaaagatcactgtaacagggaccctgtggaacggcaacaaaattatcgacgagcgcctgatcaaccccgacggctccctgctgttccgagtaaccatcaacgtt

SEQ ID NO: 1434 - protein, 158 aa, Artificial Sequence
  Synthetic
VFTLEDFVGDWPQTAAYNLDQVLEQGGVSSLFQNLAVSVTPIQRIVLSGENALKIDIHVIIPYEGLSADQMAQIEKIFKVVYPVDDHHFKVILHYGTLVIDGVTPNMIDYFGRPYEGIAVFDGKKITVTGTLWNGNKIIDERLINPDGSLLFRVTINV

SEQ ID NO: 1435 - DNA, 474 bp, Artificial Sequence
  Synthetic
gtcttcacactcgaagatttcgttggggactggcagcagacagccgcctacaacctggaccaagtccttgaacagggaggtgtgtccagtttgtttcagaatctcgccgtgtccgtaactccgatccaaaggattgtcctgagcggtgaaaatgccctgaagatcgacatccatgtcatcatcccgtatgaaggtctgagcgccgaccaaatggcccagatcgaaaaaatttttaaggtggtgtaccctgtggatgatcatcactttaaggtgatcctgcactatggcacactggtaatcgacggggttacgccgaacatgatcgactatttcggacggccgtatgaaggcatcgccgtgttcgacggcaaaaagatcactgtaacagggaccctgtggaacggcaacaaaattatcgacgagcgcctgatcaaccccgacggctccctgctgttccgagtaaccatcaacgtt

SEQ ID NO: 1436 - protein, 158 aa, Artificial Sequence
  Synthetic
VFTLEDFVGDWQQTAAYNLDQVLEQGGVSSLFQNLAVSVTPIQRIVLSGENALKIDIHVIIPYEGLSADQMAQIEKIFKVVYPVDDHHFKVILHYGTLVIDGVTPNMIDYFGRPYEGIAVFDGKKITVTGTLWNGNKIIDERLINPDGSLLFRVTINV

SEQ ID NO: 1437 - DNA, 474 bp, Artificial Sequence
  Synthetic
gtcttcacactcgaagatttcgttggggactggagccagacagccgcctacaacctggaccaagtccttgaacagggaggtgtgtccagtttgtttcagaatctcgccgtgtccgtaactccgatccaaaggattgtcctgagcggtgaaaatgccctgaagatcgacatccatgtcatcatcccgtatgaaggtctgagcgccgaccaaatggcccagatcgaaaaaatttttaaggtggtgtaccctgtggatgatcatcactttaaggtgatcctgcactatggcacactggtaatcgacggggttacgccgaacatgatcgactatttcggacggccgtatgaaggcatcgccgtgttcgacggcaaaaagatcactgtaacagggaccctgtggaacggcaacaaaattatcgacgagcgcctgatcaaccccgacggctccctgctgttccgagtaaccatcaacgtt

SEQ ID NO: 1438 - protein, 158 aa, Artificial Sequence
  Synthetic
VFTLEDFVGDWSQTAAYNLDQVLEQGGVSSLFQNLAVSVTPIQRIVLSGENALKIDIHVIIPYEGLSADQMAQIEKIFKVVYPVDDHHFKVILHYGTLVIDGVTPNMIDYFGRPYEGIAVFDGKKITVTGTLWNGNKIIDERLINPDGSLLFRVTINV

SEQ ID NO: 1439 - DNA, 474 bp, Artificial Sequence
  Synthetic
gtcttcacactcgaagatttcgttggggactggacccagacagccgcctacaacctggaccaagtccttgaacagggaggtgtgtccagtttgtttcagaatctcgccgtgtccgtaactccgatccaaaggattgtcctgagcggtgaaaatgccctgaagatcgacatccatgtcatcatcccgtatgaaggtctgagcgccgaccaaatggcccagatcgaaaaaatttttaaggtggtgtaccctgtggatgatcatcactttaaggtgatcctgcactatggcacactggtaatcgacggggttacgccgaacatgatcgactatttcggacggccgtatgaaggcatcgccgtgttcgacggcaaaaagatcactgtaacagggaccctgtggaacggcaacaaaattatcgacgagcgcctgatcaaccccgacggctccctgctgttccgagtaaccatcaacgtt

SEQ ID NO: 1440 - protein, 158 aa, Artificial Sequence
  Synthetic
VFTLEDFVGDWTQTAAYNLDQVLEQGGVSSLFQNLAVSVTPIQRIVLSGENALKIDIHVIIPYEGLSADQMAQIEKIFKVVYPVDDHHFKVILHYGTLVIDGVTPNMIDYFGRPYEGIAVFDGKKITVTGTLWNGNKIIDERLINPDGSLLFRVTINV

SEQ ID NO: 1441 - DNA, 474 bp, Artificial Sequence
  Synthetic
gtcttcacactcgaagatttcgttggggactgggtgcagacagccgcctacaacctggaccaagtccttgaacagggaggtgtgtccagtttgtttcagaatctcgccgtgtccgtaactccgatccaaaggattgtcctgagcggtgaaaatgccctgaagatcgacatccatgtcatcatcccgtatgaaggtctgagcgccgaccaaatggcccagatcgaaaaaatttttaaggtggtgtaccctgtggatgatcatcactttaaggtgatcctgcactatggcacactggtaatcgacggggttacgccgaacatgatcgactatttcggacggccgtatgaaggcatcgccgtgttcgacggcaaaaagatcactgtaacagggaccctgtggaacggcaacaaaattatcgacgagcgcctgatcaaccccgacggctccctgctgttccgagtaaccatcaacgtt

SEQ ID NO: 1442 - protein, 158 aa, Artificial Sequence
  Synthetic
VFTLEDFVGDWVQTAAYNLDQVLEQGGVSSLFQNLAVSVTPIQRIVLSGENALKIDIHVIIPYEGLSADQMAQIEKIFKVVYPVDDHHFKVILHYGTLVIDGVTPNMIDYFGRPYEGIAVFDGKKITVTGTLWNGNKIIDERLINPDGSLLFRVTINV

SEQ ID NO: 1443 - DNA, 474 bp, Artificial Sequence
  Synthetic
gtcttcacactcgaagatttcgttggggactggtggcagacagccgcctacaacctggaccaagtccttgaacagggaggtgtgtccagtttgtttcagaatctcgccgtgtccgtaactccgatccaaaggattgtcctgagcggtgaaaatgccctgaagatcgacatccatgtcatcatcccgtatgaaggtctgagcgccgaccaaatggcccagatcgaaaaaatttttaaggtggtgtaccctgtggatgatcatcactttaaggtgatcctgcactatggcacactggtaatcgacggggttacgccgaacatgatcgactatttcggacggccgtatgaaggcatcgccgtgttcgacggcaaaaagatcactgtaacagggaccctgtggaacggcaacaaaattatcgacgagcgcctgatcaaccccgacggctccctgctgttccgagtaaccatcaacgtt

SEQ ID NO: 1444 - protein, 158 aa, Artificial Sequence
  Synthetic
VFTLEDFVGDWWQTAAYNLDQVLEQGGVSSLFQNLAVSVTPIQRIVLSGENALKIDIHVIIPYEGLSADQMAQIEKIFKVVYPVDDHHFKVILHYGTLVIDGVTPNMIDYFGRPYEGIAVFDGKKITVTGTLWNGNKIIDERLINPDGSLLFRVTINV

SEQ ID NO: 1445 - DNA, 474 bp, Artificial Sequence
  Synthetic
gtcttcacactcgaagatttcgttggggactggtaccagacagccgcctacaacctggaccaagtccttgaacagggaggtgtgtccagtttgtttcagaatctcgccgtgtccgtaactccgatccaaaggattgtcctgagcggtgaaaatgccctgaagatcgacatccatgtcatcatcccgtatgaaggtctgagcgccgaccaaatggcccagatcgaaaaaatttttaaggtggtgtaccctgtggatgatcatcactttaaggtgatcctgcactatggcacactggtaatcgacggggttacgccgaacatgatcgactatttcggacggccgtatgaaggcatcgccgtgttcgacggcaaaaagatcactgtaacagggaccctgtggaacggcaacaaaattatcgacgagcgcctgatcaaccccgacggctccctgctgttccgagtaaccatcaacgtt

SEQ ID NO: 1446 - protein, 158 aa, Artificial Sequence
  Synthetic
VFTLEDFVGDWYQTAAYNLDQVLEQGGVSSLFQNLAVSVTPIQRIVLSGENALKIDIHVIIPYEGLSADQMAQIEKIFKVVYPVDDHHFKVILHYGTLVIDGVTPNMIDYFGRPYEGIAVFDGKKITVTGTLWNGNKIIDERLINPDGSLLFRVTINV

SEQ ID NO: 1447 - DNA, 474 bp, Artificial Sequence
  Synthetic
gtcttcacactcgaagatttcgttggggactggcgacagacagcctgctacaacctggaccaagtccttgaacagggaggtgtgtccagtttgtttcagaatctcgccgtgtccgtaactccgatccaaaggattgtcctgagcggtgaaaatgccctgaagatcgacatccatgtcatcatcccgtatgaaggtctgagcgccgaccaaatggcccagatcgaaaaaatttttaaggtggtgtaccctgtggatgatcatcactttaaggtgatcctgcactatggcacactggtaatcgacggggttacgccgaacatgatcgactatttcggacggccgtatgaaggcatcgccgtgttcgacggcaaaaagatcactgtaacagggaccctgtggaacggcaacaaaattatcgacgagcgcctgatcaaccccgacggctccctgctgttccgagtaaccatcaacgtt

SEQ ID NO: 1448 - protein, 158 aa, Artificial Sequence
  Synthetic
VFTLEDFVGDWRQTACYNLDQVLEQGGVSSLFQNLAVSVTPIQRIVLSGENALKIDIHVIIPYEGLSADQMAQIEKIFKVVYPVDDHHFKVILHYGTLVIDGVTPNMIDYFGRPYEGIAVFDGKKITVTGTLWNGNKIIDERLINPDGSLLFRVTINV

SEQ ID NO: 1449 - DNA, 474 bp, Artificial Sequence
  Synthetic
gtcttcacactcgaagatttcgttggggactggcgacagacagccgactacaacctggaccaagtccttgaacagggaggtgtgtccagtttgtttcagaatctcgccgtgtccgtaactccgatccaaaggattgtcctgagcggtgaaaatgccctgaagatcgacatccatgtcatcatcccgtatgaaggtctgagcgccgaccaaatggcccagatcgaaaaaatttttaaggtggtgtaccctgtggatgatcatcactttaaggtgatcctgcactatggcacactggtaatcgacggggttacgccgaacatgatcgactatttcggacggccgtatgaaggcatcgccgtgttcgacggcaaaaagatcactgtaacagggaccctgtggaacggcaacaaaattatcgacgagcgcctgatcaaccccgacggctccctgctgttccgagtaaccatcaacgtt

SEQ ID NO: 1450 - protein, 158 aa, Artificial Sequence
  Synthetic
VFTLEDFVGDWRQTADYNLDQVLEQGGVSSLFQNLAVSVTPIQRIVLSGENALKIDIHVIIPYEGLSADQMAQIEKIFKVVYPVDDHHFKVILHYGTLVIDGVTPNMIDYFGRPYEGIAVFDGKKITVTGTLWNGNKIIDERLINPDGSLLFRVTINV

SEQ ID NO: 1451 - DNA, 474 bp, Artificial Sequence
  Synthetic
gtcttcacactcgaagatttcgttggggactggcgacagacagccgagtacaacctggaccaagtccttgaacagggaggtgtgtccagtttgtttcagaatctcgccgtgtccgtaactccgatccaaaggattgtcctgagcggtgaaaatgccctgaagatcgacatccatgtcatcatcccgtatgaaggtctgagcgccgaccaaatggcccagatcgaaaaaatttttaaggtggtgtaccctgtggatgatcatcactttaaggtgatcctgcactatggcacactggtaatcgacggggttacgccgaacatgatcgactatttcggacggccgtatgaaggcatcgccgtgttcgacggcaaaaagatcactgtaacagggaccctgtggaacggcaacaaaattatcgacgagcgcctgatcaaccccgacggctccctgctgttccgagtaaccatcaacgtt

SEQ ID NO: 1452 - protein, 158 aa, Artificial Sequence
  Synthetic
VFTLEDFVGDWRQTAEYNLDQVLEQGGVSSLFQNLAVSVTPIQRIVLSGENALKIDIHVIIPYEGLSADQMAQIEKIFKVVYPVDDHHFKVILHYGTLVIDGVTPNMIDYFGRPYEGIAVFDGKKITVTGTLWNGNKIIDERLINPDGSLLFRVTINV

SEQ ID NO: 1453 - DNA, 474 bp, Artificial Sequence
  Synthetic
gtcttcacactcgaagatttcgttggggactggcgacagacagccttctacaacctggaccaagtccttgaacagggaggtgtgtccagtttgtttcagaatctcgccgtgtccgtaactccgatccaaaggattgtcctgagcggtgaaaatgccctgaagatcgacatccatgtcatcatcccgtatgaaggtctgagcgccgaccaaatggcccagatcgaaaaaatttttaaggtggtgtaccctgtggatgatcatcactttaaggtgatcctgcactatggcacactggtaatcgacggggttacgccgaacatgatcgactatttcggacggccgtatgaaggcatcgccgtgttcgacggcaaaaagatcactgtaacagggaccctgtggaacggcaacaaaattatcgacgagcgcctgatcaaccccgacggctccctgctgttccgagtaaccatcaacgtt

SEQ ID NO: 1454 - protein, 158 aa, Artificial Sequence
  Synthetic
VFTLEDFVGDWRQTAFYNLDQVLEQGGVSSLFQNLAVSVTPIQRIVLSGENALKIDIHVIIPYEGLSADQMAQIEKIFKVVYPVDDHHFKVILHYGTLVIDGVTPNMIDYFGRPYEGIAVFDGKKITVTGTLWNGNKIIDERLINPDGSLLFRVTINV

SEQ ID NO: 1455 - DNA, 474 bp, Artificial Sequence; identical to SEQ ID NO: 1399
  Synthetic

SEQ ID NO: 1456 - protein, 158 aa, Artificial Sequence; identical to SEQ ID NO: 1400
  Synthetic

SEQ ID NO: 1457 - DNA, 474 bp, Artificial Sequence
  Synthetic
gtcttcacactcgaagatttcgttggggactggcgacagacagcccactacaacctggaccaagtccttgaacagggaggtgtgtccagtttgtttcagaatctcgccgtgtccgtaactccgatccaaaggattgtcctgagcggtgaaaatgccctgaagatcgacatccatgtcatcatcccgtatgaaggtctgagcgccgaccaaatggcccagatcgaaaaaatttttaaggtggtgtaccctgtggatgatcatcactttaaggtgatcctgcactatggcacactggtaatcgacggggttacgccgaacatgatcgactatttcggacggccgtatgaaggcatcgccgtgttcgacggcaaaaagatcactgtaacagggaccctgtggaacggcaacaaaattatcgacgagcgcctgatcaaccccgacggctccctgctgttccgagtaaccatcaacgtt

SEQ ID NO: 1458 - protein, 158 aa, Artificial Sequence
  Synthetic
VFTLEDFVGDWRQTAHYNLDQVLEQGGVSSLFQNLAVSVTPIQRIVLSGENALKIDIHVIIPYEGLSADQMAQIEKIFKVVYPVDDHHFKVILHYGTLVIDGVTPNMIDYFGRPYEGIAVFDGKKITVTGTLWNGNKIIDERLINPDGSLLFRVTINV

SEQ ID NO: 1459 - DNA, 474 bp, Artificial Sequence
  Synthetic
gtcttcacactcgaagatttcgttggggactggcgacagacagccatctacaacctggaccaagtccttgaacagggaggtgtgtccagtttgtttcagaatctcgccgtgtccgtaactccgatccaaaggattgtcctgagcggtgaaaatgccctgaagatcgacatccatgtcatcatcccgtatgaaggtctgagcgccgaccaaatggcccagatcgaaaaaatttttaaggtggtgtaccctgtggatgatcatcactttaaggtgatcctgcactatggcacactggtaatcgacggggttacgccgaacatgatcgactatttcggacggccgtatgaaggcatcgccgtgttcgacggcaaaaagatcactgtaacagggaccctgtggaacggcaacaaaattatcgacgagcgcctgatcaaccccgacggctccctgctgttccgagtaaccatcaacgtt

SEQ ID NO: 1460 - protein, 158 aa, Artificial Sequence
  Synthetic
VFTLEDFVGDWRQTAIYNLDQVLEQGGVSSLFQNLAVSVTPIQRIVLSGENALKIDIHVIIPYEGLSADQMAQIEKIFKVVYPVDDHHFKVILHYGTLVIDGVTPNMIDYFGRPYEGIAVFDGKKITVTGTLWNGNKIIDERLINPDGSLLFRVTINV

SEQ ID NO: 1461 - DNA, 474 bp, Artificial Sequence
  Synthetic
gtcttcacactcgaagatttcgttggggactggcgacagacagccaagtacaacctggaccaagtccttgaacagggaggtgtgtccagtttgtttcagaatctcgccgtgtccgtaactccgatccaaaggattgtcctgagcggtgaaaatgccctgaagatcgacatccatgtcatcatcccgtatgaaggtctgagcgccgaccaaatggcccagatcgaaaaaatttttaaggtggtgtaccctgtggatgatcatcactttaaggtgatcctgcactatggcacactggtaatcgacggggttacgccgaacatgatcgactatttcggacggccgtatgaaggcatcgccgtgttcgacggcaaaaagatcactgtaacagggaccctgtggaacggcaacaaaattatcgacgagcgcctgatcaaccccgacggctccctgctgttccgagtaaccatcaacgtt

SEQ ID NO: 1462 - protein, 158 aa, Artificial Sequence
  Synthetic
VFTLEDFVGDWRQTAKYNLDQVLEQGGVSSLFQNLAVSVTPIQRIVLSGENALKIDIHVIIPYEGLSADQMAQIEKIFKVVYPVDDHHFKVILHYGTLVIDGVTPNMIDYFGRPYEGIAVFDGKKITVTGTLWNGNKIIDERLINPDGSLLFRVTINV

SEQ ID NO: 1463 - DNA, 474 bp, Artificial Sequence
  Synthetic
gtcttcacactcgaagatttcgttggggactggcgacagacagccctgtacaacctggaccaagtccttgaacagggaggtgtgtccagtttgtttcagaatctcgccgtgtccgtaactccgatccaaaggattgtcctgagcggtgaaaatgccctgaagatcgacatccatgtcatcatcccgtatgaaggtctgagcgccgaccaaatggcccagatcgaaaaaatttttaaggtggtgtaccctgtggatgatcatcactttaaggtgatcctgcactatggcacactggtaatcgacggggttacgccgaacatgatcgactatttcggacggccgtatgaaggcatcgccgtgttcgacggcaaaaagatcactgtaacagggaccctgtggaacggcaacaaaattatcgacgagcgcctgatcaaccccgacggctccctgctgttccgagtaaccatcaacgtt

SEQ ID NO: 1464 - protein, 158 aa, Artificial Sequence
  Synthetic
VFTLEDFVGDWRQTALYNLDQVLEQGGVSSLFQNLAVSVTPIQRIVLSGENALKIDIHVIIPYEGLSADQMAQIEKIFKVVYPVDDHHFKVILHYGTLVIDGVTPNMIDYFGRPYEGIAVFDGKKITVTGTLWNGNKIIDERLINPDGSLLFRVTINV

SEQ ID NO: 1465 - DNA, 474 bp, Artificial Sequence
  Synthetic
gtcttcacactcgaagatttcgttggggactggcgacagacagccatgtacaacctggaccaagtccttgaacagggaggtgtgtccagtttgtttcagaatctcgccgtgtccgtaactccgatccaaaggattgtcctgagcggtgaaaatgccctgaagatcgacatccatgtcatcatcccgtatgaaggtctgagcgccgaccaaatggcccagatcgaaaaaatttttaaggtggtgtaccctgtggatgatcatcactttaaggtgatcctgcactatggcacactggtaatcgacggggttacgccgaacatgatcgactatttcggacggccgtatgaaggcatcgccgtgttcgacggcaaaaagatcactgtaacagggaccctgtggaacggcaacaaaattatcgacgagcgcctgatcaaccccgacggctccctgctgttccgagtaaccatcaacgtt

SEQ ID NO: 1466 - protein, 158 aa, Artificial Sequence
  Synthetic
VFTLEDFVGDWRQTAMYNLDQVLEQGGVSSLFQNLAVSVTPIQRIVLSGENALKIDIHVIIPYEGLSADQMAQIEKIFKVVYPVDDHHFKVILHYGTLVIDGVTPNMIDYFGRPYEGIAVFDGKKITVTGTLWNGNKIIDERLINPDGSLLFRVTINV

SEQ ID NO: 1467 - DNA, 474 bp, Artificial Sequence
  Synthetic
gtcttcacactcgaagatttcgttggggactggcgacagacagccaactacaacctggaccaagtccttgaacagggaggtgtgtccagtttgtttcagaatctcgccgtgtccgtaactccgatccaaaggattgtcctgagcggtgaaaatgccctgaagatcgacatccatgtcatcatcccgtatgaaggtctgagcgccgaccaaatggcccagatcgaaaaaatttttaaggtggtgtaccctgtggatgatcatcactttaaggtgatcctgcactatggcacactggtaatcgacggggttacgccgaacatgatcgactatttcggacggccgtatgaaggcatcgccgtgttcgacggcaaaaagatcactgtaacagggaccctgtggaacggcaacaaaattatcgacgagcgcctgatcaaccccgacggctccctgctgttccgagtaaccatcaacgtt

SEQ ID NO: 1468 - protein, 158 aa, Artificial Sequence
  Synthetic
VFTLEDFVGDWRQTANYNLDQVLEQGGVSSLFQNLAVSVTPIQRIVLSGENALKIDIHVIIPYEGLSADQMAQIEKIFKVVYPVDDHHFKVILHYGTLVIDGVTPNMIDYFGRPYEGIAVFDGKKITVTGTLWNGNKIIDERLINPDGSLLFRVTINV

SEQ ID NO: 1469 - DNA, 474 bp, Artificial Sequence
  Synthetic
gtcttcacactcgaagatttcgttggggactggcgacagacagccccctacaacctggaccaagtccttgaacagggaggtgtgtccagtttgtttcagaatctcgccgtgtccgtaactccgatccaaaggattgtcctgagcggtgaaaatgccctgaagatcgacatccatgtcatcatcccgtatgaaggtctgagcgccgaccaaatggcccagatcgaaaaaatttttaaggtggtgtaccctgtggatgatcatcactttaaggtgatcctgcactatggcacactggtaatcgacggggttacgccgaacatgatcgactatttcggacggccgtatgaaggcatcgccgtgttcgacggcaaaaagatcactgtaacagggaccctgtggaacggcaacaaaattatcgacgagcgcctgatcaaccccgacggctccctgctgttccgagtaaccatcaacgtt

SEQ ID NO: 1470 - protein, 158 aa, Artificial Sequence
  Synthetic
VFTLEDFVGDWRQTAPYNLDQVLEQGGVSSLFQNLAVSVTPIQRIVLSGENALKIDIHVIIPYEGLSADQMAQIEKIFKVVYPVDDHHFKVILHYGTLVIDGVTPNMIDYFGRPYEGIAVFDGKKITVTGTLWNGNKIIDERLINPDGSLLFRVTINV

SEQ ID NO: 1471 - DNA, 474 bp, Artificial Sequence
  Synthetic
gtcttcacactcgaagatttcgttggggactggcgacagacagcccagtacaacctggaccaagtccttgaacagggaggtgtgtccagtttgtttcagaatctcgccgtgtccgtaactccgatccaaaggattgtcctgagcggtgaaaatgccctgaagatcgacatccatgtcatcatcccgtatgaaggtctgagcgccgaccaaatggcccagatcgaaaaaatttttaaggtggtgtaccctgtggatgatcatcactttaaggtgatcctgcactatggcacactggtaatcgacggggttacgccgaacatgatcgactatttcggacggccgtatgaaggcatcgccgtgttcgacggcaaaaagatcactgtaacagggaccctgtggaacggcaacaaaattatcgacgagcgcctgatcaaccccgacggctccctgctgttccgagtaaccatcaacgtt

SEQ ID NO: 1472 - protein, 158 aa, Artificial Sequence
  Synthetic
VFTLEDFVGDWRQTAQYNLDQVLEQGGVSSLFQNLAVSVTPIQRIVLSGENALKIDIHVIIPYEGLSADQMAQIEKIFKVVYPVDDHHFKVILHYGTLVIDGVTPNMIDYFGRPYEGIAVFDGKKITVTGTLWNGNKIIDERLINPDGSLLFRVTINV

SEQ ID NO: 1473 - DNA, 474 bp, Artificial Sequence
  Synthetic
gtcttcacactcgaagatttcgttggggactggcgacagacagcccggtacaacctggaccaagtccttgaacagggaggtgtgtccagtttgtttcagaatctcgccgtgtccgtaactccgatccaaaggattgtcctgagcggtgaaaatgccctgaagatcgacatccatgtcatcatcccgtatgaaggtctgagcgccgaccaaatggcccagatcgaaaaaatttttaaggtggtgtaccctgtggatgatcatcactttaaggtgatcctgcactatggcacactggtaatcgacggggttacgccgaacatgatcgactatttcggacggccgtatgaaggcatcgccgtgttcgacggcaaaaagatcactgtaacagggaccctgtggaacggcaacaaaattatcgacgagcgcctgatcaaccccgacggctccctgctgttccgagtaaccatcaacgtt

SEQ ID NO: 1474 - protein, 158 aa, Artificial Sequence
  Synthetic
VFTLEDFVGDWRQTARYNLDQVLEQGGVSSLFQNLAVSVTPIQRIVLSGENALKIDIHVIIPYEGLSADQMAQIEKIFKVVYPVDDHHFKVILHYGTLVIDGVTPNMIDYFGRPYEGIAVFDGKKITVTGTLWNGNKIIDERLINPDGSLLFRVTINV

SEQ ID NO: 1475 - DNA, 474 bp, Artificial Sequence
  Synthetic
gtcttcacactcgaagatttcgttggggactggcgacagacagccagctacaacctggaccaagtccttgaacagggaggtgtgtccagtttgtttcagaatctcgccgtgtccgtaactccgatccaaaggattgtcctgagcggtgaaaatgccctgaagatcgacatccatgtcatcatcccgtatgaaggtctgagcgccgaccaaatggcccagatcgaaaaaatttttaaggtggtgtaccctgtggatgatcatcactttaaggtgatcctgcactatggcacactggtaatcgacggggttacgccgaacatgatcgactatttcggacggccgtatgaaggcatcgccgtgttcgacggcaaaaagatcactgtaacagggaccctgtggaacggcaacaaaattatcgacgagcgcctgatcaaccccgacggctccctgctgttccgagtaaccatcaacgtt

SEQ ID NO: 1476 - protein, 158 aa, Artificial Sequence
  Synthetic
VFTLEDFVGDWRQTASYNLDQVLEQGGVSSLFQNLAVSVTPIQRIVLSGENALKIDIHVIIPYEGLSADQMAQIEKIFKVVYPVDDHHFKVILHYGTLVIDGVTPNMIDYFGRPYEGIAVFDGKKITVTGTLWNGNKIIDERLINPDGSLLFRVTINV

SEQ ID NO: 1477 - DNA, 474 bp, Artificial Sequence
  Synthetic
gtcttcacactcgaagatttcgttggggactggcgacagacagccacctacaacctggaccaagtccttgaacagggaggtgtgtccagtttgtttcagaatctcgccgtgtccgtaactccgatccaaaggattgtcctgagcggtgaaaatgccctgaagatcgacatccatgtcatcatcccgtatgaaggtctgagcgccgaccaaatggcccagatcgaaaaaatttttaaggtggtgtaccctgtggatgatcatcactttaaggtgatcctgcactatggcacactggtaatcgacggggttacgccgaacatgatcgactatttcggacggccgtatgaaggcatcgccgtgttcgacggcaaaaagatcactgtaacagggaccctgtggaacggcaacaaaattatcgacgagcgcctgatcaaccccgacggctccctgctgttccgagtaaccatcaacgtt

SEQ ID NO: 1478 - protein, 158 aa, Artificial Sequence
  Synthetic
VFTLEDFVGDWRQTATYNLDQVLEQGGVSSLFQNLAVSVTPIQRIVLSGENALKIDIHVIIPYEGLSADQMAQIEKIFKVVYPVDDHHFKVILHYGTLVIDGVTPNMIDYFGRPYEGIAVFDGKKITVTGTLWNGNKIIDERLINPDGSLLFRVTINV

SEQ ID NO: 1479 - DNA, 474 bp, Artificial Sequence
  Synthetic
gtcttcacactcgaagatttcgttggggactggcgacagacagccgtgtacaacctggaccaagtccttgaacagggaggtgtgtccagtttgtttcagaatctcgccgtgtccgtaactccgatccaaaggattgtcctgagcggtgaaaatgccctgaagatcgacatccatgtcatcatcccgtatgaaggtctgagcgccgaccaaatggcccagatcgaaaaaatttttaaggtggtgtaccctgtggatgatcatcactttaaggtgatcctgcactatggcacactggtaatcgacggggttacgccgaacatgatcgactatttcggacggccgtatgaaggcatcgccgtgttcgacggcaaaaagatcactgtaacagggaccctgtggaacggcaacaaaattatcgacgagcgcctgatcaaccccgacggctccctgctgttccgagtaaccatcaacgtt

SEQ ID NO: 1480 - protein, 158 aa, Artificial Sequence
  Synthetic
VFTLEDFVGDWRQTAVYNLDQVLEQGGVSSLFQNLAVSVTPIQRIVLSGENALKIDIHVIIPYEGLSADQMAQIEKIFKVVYPVDDHHFKVILHYGTLVIDGVTPNMIDYFGRPYEGIAVFDGKKITVTGTLWNGNKIIDERLINPDGSLLFRVTINV

SEQ ID NO: 1481 - DNA, 474 bp, Artificial Sequence
  Synthetic
gtcttcacactcgaagatttcgttggggactggcgacagacagcctggtacaacctggaccaagtccttgaacagggaggtgtgtccagtttgtttcagaatctcgccgtgtccgtaactccgatccaaaggattgtcctgagcggtgaaaatgccctgaagatcgacatccatgtcatcatcccgtatgaaggtctgagcgccgaccaaatggcccagatcgaaaaaatttttaaggtggtgtaccctgtggatgatcatcactttaaggtgatcctgcactatggcacactggtaatcgacggggttacgccgaacatgatcgactatttcggacggccgtatgaaggcatcgccgtgttcgacggcaaaaagatcactgtaacagggaccctgtggaacggcaacaaaattatcgacgagcgcctgatcaaccccgacggctccctgctgttccgagtaaccatcaacgtt

SEQ ID NO: 1482 - protein, 158 aa, Artificial Sequence
  Synthetic
VFTLEDFVGDWRQTAWYNLDQVLEQGGVSSLFQNLAVSVTPIQRIVLSGENALKIDIHVIIPYEGLSADQMAQIEKIFKVVYPVDDHHFKVILHYGTLVIDGVTPNMIDYFGRPYEGIAVFDGKKITVTGTLWNGNKIIDERLINPDGSLLFRVTINV

SEQ ID NO: 1483 - DNA, 474 bp, Artificial Sequence
  Synthetic
gtcttcacactcgaagatttcgttggggactggcgacagacagcctactacaacctggaccaagtccttgaacagggaggtgtgtccagtttgtttcagaatctcgccgtgtccgtaactccgatccaaaggattgtcctgagcggtgaaaatgccctgaagatcgacatccatgtcatcatcccgtatgaaggtctgagcgccgaccaaatggcccagatcgaaaaaatttttaaggtggtgtaccctgtggatgatcatcactttaaggtgatcctgcactatggcacactggtaatcgacggggttacgccgaacatgatcgactatttcggacggccgtatgaaggcatcgccgtgttcgacggcaaaaagatcactgtaacagggaccctgtggaacggcaacaaaattatcgacgagcgcctgatcaaccccgacggctccctgctgttccgagtaaccatcaacgtt

SEQ ID NO: 1484 - protein, 158 aa, Artificial Sequence
  Synthetic
VFTLEDFVGDWRQTAYYNLDQVLEQGGVSSLFQNLAVSVTPIQRIVLSGENALKIDIHVIIPYEGLSADQMAQIEKIFKVVYPVDDHHFKVILHYGTLVIDGVTPNMIDYFGRPYEGIAVFDGKKITVTGTLWNGNKIIDERLINPDGSLLFRVTINV

SEQ ID NO: 1485 - DNA, 474 bp, Artificial Sequence
  Synthetic
gtcttcacactcgaagatttcgttggggactggcgacagacagccgcctacaacgccgaccaagtccttgaacagggaggtgtgtccagtttgtttcagaatctcgccgtgtccgtaactccgatccaaaggattgtcctgagcggtgaaaatgccctgaagatcgacatccatgtcatcatcccgtatgaaggtctgagcgccgaccaaatggcccagatcgaaaaaatttttaaggtggtgtaccctgtggatgatcatcactttaaggtgatcctgcactatggcacactggtaatcgacggggttacgccgaacatgatcgactatttcggacggccgtatgaaggcatcgccgtgttcgacggcaaaaagatcactgtaacagggaccctgtggaacggcaacaaaattatcgacgagcgcctgatcaaccccgacggctccctgctgttccgagtaaccatcaacgtt

SEQ ID NO: 1486 - protein, 158 aa, Artificial Sequence
  Synthetic
VFTLEDFVGDWRQTAAYNADQVLEQGGVSSLFQNLAVSVTPIQRIVLSGENALKIDIHVIIPYEGLSADQMAQIEKIFKVVYPVDDHHFKVILHYGTLVIDGVTPNMIDYFGRPYEGIAVFDGKKITVTGTLWNGNKIIDERLINPDGSLLFRVTINV

SEQ ID NO: 1487 - DNA, 474 bp, Artificial Sequence
  Synthetic
gtcttcacactcgaagatttcgttggggactggcgacagacagccgcctacaactgcgaccaagtccttgaacagggaggtgtgtccagtttgtttcagaatctcgccgtgtccgtaactccgatccaaaggattgtcctgagcggtgaaaatgccctgaagatcgacatccatgtcatcatcccgtatgaaggtctgagcgccgaccaaatggcccagatcgaaaaaatttttaaggtggtgtaccctgtggatgatcatcactttaaggtgatcctgcactatggcacactggtaatcgacggggttacgccgaacatgatcgactatttcggacggccgtatgaaggcatcgccgtgttcgacggcaaaaagatcactgtaacagggaccctgtggaacggcaacaaaattatcgacgagcgcctgatcaaccccgacggctccctgctgttccgagtaaccatcaacgtt

SEQ ID NO: 1488 - protein, 158 aa, Artificial Sequence
  Synthetic
VFTLEDFVGDWRQTAAYNCDQVLEQGGVSSLFQNLAVSVTPIQRIVLSGENALKIDIHVIIPYEGLSADQMAQIEKIFKVVYPVDDHHFKVILHYGTLVIDGVTPNMIDYFGRPYEGIAVFDGKKITVTGTLWNGNKIIDERLINPDGSLLFRVTINV

SEQ ID NO: 1489 - DNA, 474 bp, Artificial Sequence
  Synthetic
gtcttcacactcgaagatttcgttggggactggcgacagacagccgcctacaacgacgaccaagtccttgaacagggaggtgtgtccagtttgtttcagaatctcgccgtgtccgtaactccgatccaaaggattgtcctgagcggtgaaaatgccctgaagatcgacatccatgtcatcatcccgtatgaaggtctgagcgccgaccaaatggcccagatcgaaaaaatttttaaggtggtgtaccctgtggatgatcatcactttaaggtgatcctgcactatggcacactggtaatcgacggggttacgccgaacatgatcgactatttcggacggccgtatgaaggcatcgccgtgttcgacggcaaaaagatcactgtaacagggaccctgtggaacggcaacaaaattatcgacgagcgcctgatcaaccccgacggctccctgctgttccgagtaaccatcaacgtt

SEQ ID NO: 1490 - protein, 158 aa, Artificial Sequence
  Synthetic
VFTLEDFVGDWRQTAAYNDDQVLEQGGVSSLFQNLAVSVTPIQRIVLSGENALKIDIHVIIPYEGLSADQMAQIEKIFKVVYPVDDHHFKVILHYGTLVIDGVTPNMIDYFGRPYEGIAVFDGKKITVTGTLWNGNKIIDERLINPDGSLLFRVTINV

SEQ ID NO: 1491 - DNA, 474 bp, Artificial Sequence
  Synthetic
gtcttcacactcgaagatttcgttggggactggcgacagacagccgcctacaacgaggaccaagtccttgaacagggaggtgtgtccagtttgtttcagaatctcgccgtgtccgtaactccgatccaaaggattgtcctgagcggtgaaaatgccctgaagatcgacatccatgtcatcatcccgtatgaaggtctgagcgccgaccaaatggcccagatcgaaaaaatttttaaggtggtgtaccctgtggatgatcatcactttaaggtgatcctgcactatggcacactggtaatcgacggggttacgccgaacatgatcgactatttcggacggccgtatgaaggcatcgccgtgttcgacggcaaaaagatcactgtaacagggaccctgtggaacggcaacaaaattatcgacgagcgcctgatcaaccccgacggctccctgctgttccgagtaaccatcaacgtt

SEQ ID NO: 1492 - protein, 158 aa, Artificial Sequence
  Synthetic
VFTLEDFVGDWRQTAAYNEDQVLEQGGVSSLFQNLAVSVTPIQRIVLSGENALKIDIHVIIPYEGLSADQMAQIEKIFKVVYPVDDHHFKVILHYGTLVIDGVTPNMIDYFGRPYEGIAVFDGKKITVTGTLWNGNKIIDERLINPDGSLLFRVTINV

SEQ ID NO: 1493 - DNA, 474 bp, Artificial Sequence
  Synthetic
gtcttcacactcgaagatttcgttggggactggcgacagacagccgcctacaacttcgaccaagtccttgaacagggaggtgtgtccagtttgtttcagaatctcgccgtgtccgtaactccgatccaaaggattgtcctgagcggtgaaaatgccctgaagatcgacatccatgtcatcatcccgtatgaaggtctgagcgccgaccaaatggcccagatcgaaaaaatttttaaggtggtgtaccctgtggatgatcatcactttaaggtgatcctgcactatggcacactggtaatcgacggggttacgccgaacatgatcgactatttcggacggccgtatgaaggcatcgccgtgttcgacggcaaaaagatcactgtaacagggaccctgtggaacggcaacaaaattatcgacgagcgcctgatcaaccccgacggctccctgctgttccgagtaaccatcaacgtt

SEQ ID NO: 1494 - protein, 158 aa, Artificial Sequence
  Synthetic
VFTLEDFVGDWRQTAAYNFDQVLEQGGVSSLFQNLAVSVTPIQRIVLSGENALKIDIHVIIPYEGLSADQMAQIEKIFKVVYPVDDHHFKVILHYGTLVIDGVTPNMIDYFGRPYEGIAVFDGKKITVTGTLWNGNKIIDERLINPDGSLLFRVTINV

SEQ ID NO: 1495 - DNA, 474 bp, Artificial Sequence
  Synthetic
gtcttcacactcgaagatttcgttggggactggcgacagacagccgcctacaacggcgaccaagtccttgaacagggaggtgtgtccagtttgtttcagaatctcgccgtgtccgtaactccgatccaaaggattgtcctgagcggtgaaaatgccctgaagatcgacatccatgtcatcatcccgtatgaaggtctgagcgccgaccaaatggcccagatcgaaaaaatttttaaggtggtgtaccctgtggatgatcatcactttaaggtgatcctgcactatggcacactggtaatcgacggggttacgccgaacatgatcgactatttcggacggccgtatgaaggcatcgccgtgttcgacggcaaaaagatcactgtaacagggaccctgtggaacggcaacaaaattatcgacgagcgcctgatcaaccccgacggctccctgctgttccgagtaaccatcaacgtt

SEQ ID NO: 1496 - protein, 158 aa, Artificial Sequence
  Synthetic
VFTLEDFVGDWRQTAAYNGDQVLEQGGVSSLFQNLAVSVTPIQRIVLSGENALKIDIHVIIPYEGLSADQMAQIEKIFKVVYPVDDHHFKVILHYGTLVIDGVTPNMIDYFGRPYEGIAVFDGKKITVTGTLWNGNKIIDERLINPDGSLLFRVTINV

SEQ ID NO: 1497 - DNA, 474 bp, Artificial Sequence
  Synthetic
gtcttcacactcgaagatttcgttggggactggcgacagacagccgcctacaaccacgaccaagtccttgaacagggaggtgtgtccagtttgtttcagaatctcgccgtgtccgtaactccgatccaaaggattgtcctgagcggtgaaaatgccctgaagatcgacatccatgtcatcatcccgtatgaaggtctgagcgccgaccaaatggcccagatcgaaaaaatttttaaggtggtgtaccctgtggatgatcatcactttaaggtgatcctgcactatggcacactggtaatcgacggggttacgccgaacatgatcgactatttcggacggccgtatgaaggcatcgccgtgttcgacggcaaaaagatcactgtaacagggaccctgtggaacggcaacaaaattatcgacgagcgcctgatcaaccccgacggctccctgctgttccgagtaaccatcaacgtt

SEQ ID NO: 1498 - protein, 158 aa, Artificial Sequence
  Synthetic
VFTLEDFVGDWRQTAAYNHDQVLEQGGVSSLFQNLAVSVTPIQRIVLSGENALKIDIHVIIPYEGLSADQMAQIEKIFKVVYPVDDHHFKVILHYGTLVIDGVTPNMIDYFGRPYEGIAVFDGKKITVTGTLWNGNKIIDERLINPDGSLLFRVTINV

SEQ ID NO: 1499 - DNA, 474 bp, Artificial Sequence
  Synthetic
gtcttcacactcgaagatttcgttggggactggcgacagacagccgcctacaacatcgaccaagtccttgaacagggaggtgtgtccagtttgtttcagaatctcgccgtgtccgtaactccgatccaaaggattgtcctgagcggtgaaaatgccctgaagatcgacatccatgtcatcatcccgtatgaaggtctgagcgccgaccaaatggcccagatcgaaaaaatttttaaggtggtgtaccctgtggatgatcatcactttaaggtgatcctgcactatggcacactggtaatcgacggggttacgccgaacatgatcgactatttcggacggccgtatgaaggcatcgccgtgttcgacggcaaaaagatcactgtaacagggaccctgtggaacggcaacaaaattatcgacgagcgcctgatcaaccccgacggctccctgctgttccgagtaaccatcaacgtt

SEQ ID NO: 1500 - protein, 158 aa, Artificial Sequence
  Synthetic
VFTLEDFVGDWRQTAAYNIDQVLEQGGVSSLFQNLAVSVTPIQRIVLSGENALKIDIHVIIPYEGLSADQMAQIEKIFKVVYPVDDHHFKVILHYGTLVIDGVTPNMIDYFGRPYEGIAVFDGKKITVTGTLWNGNKIIDERLINPDGSLLFRVTINV

SEQ ID NO: 1501 - DNA, 474 bp, Artificial Sequence
  Synthetic
gtcttcacactcgaagatttcgttggggactggcgacagacagccgcctacaacaaggaccaagtccttgaacagggaggtgtgtccagtttgtttcagaatctcgccgtgtccgtaactccgatccaaaggattgtcctgagcggtgaaaatgccctgaagatcgacatccatgtcatcatcccgtatgaaggtctgagcgccgaccaaatggcccagatcgaaaaaatttttaaggtggtgtaccctgtggatgatcatcactttaaggtgatcctgcactatggcacactggtaatcgacggggttacgccgaacatgatcgactatttcggacggccgtatgaaggcatcgccgtgttcgacggcaaaaagatcactgtaacagggaccctgtggaacggcaacaaaattatcgacgagcgcctgatcaaccccgacggctccctgctgttccgagtaaccatcaacgtt

SEQ ID NO: 1502 - protein, 158 aa, Artificial Sequence
  Synthetic
VFTLEDFVGDWRQTAAYNKDQVLEQGGVSSLFQNLAVSVTPIQRIVLSGENALKIDIHVIIPYEGLSADQMAQIEKIFKVVYPVDDHHFKVILHYGTLVIDGVTPNMIDYFGRPYEGIAVFDGKKITVTGTLWNGNKIIDERLINPDGSLLFRVTINV

SEQ ID NO: 1503 - DNA, 474 bp, Artificial Sequence
  Synthetic
gtcttcacactcgaagatttcgttggggactggcgacagacagccgcctacaacatggaccaagtccttgaacagggaggtgtgtccagtttgtttcagaatctcgccgtgtccgtaactccgatccaaaggattgtcctgagcggtgaaaatgccctgaagatcgacatccatgtcatcatcccgtatgaaggtctgagcgccgaccaaatggcccagatcgaaaaaatttttaaggtggtgtaccctgtggatgatcatcactttaaggtgatcctgcactatggcacactggtaatcgacggggttacgccgaacatgatcgactatttcggacggccgtatgaaggcatcgccgtgttcgacggcaaaaagatcactgtaacagggaccctgtggaacggcaacaaaattatcgacgagcgcctgatcaaccccgacggctccctgctgttccgagtaaccatcaacgtt

SEQ ID NO: 1504 - protein, 158 aa, Artificial Sequence
  Synthetic
VFTLEDFVGDWRQTAAYNMDQVLEQGGVSSLFQNLAVSVTPIQRIVLSGENALKIDIHVIIPYEGLSADQMAQIEKIFKVVYPVDDHHFKVILHYGTLVIDGVTPNMIDYFGRPYEGIAVFDGKKITVTGTLWNGNKIIDERLINPDGSLLFRVTINV

SEQ ID NO: 1505 - DNA, 474 bp, Artificial Sequence
  Synthetic
gtcttcacactcgaagatttcgttggggactggcgacagacagccgcctacaacaacgaccaagtccttgaacagggaggtgtgtccagtttgtttcagaatctcgccgtgtccgtaactccgatccaaaggattgtcctgagcggtgaaaatgccctgaagatcgacatccatgtcatcatcccgtatgaaggtctgagcgccgaccaaatggcccagatcgaaaaaatttttaaggtggtgtaccctgtggatgatcatcactttaaggtgatcctgcactatggcacactggtaatcgacggggttacgccgaacatgatcgactatttcggacggccgtatgaaggcatcgccgtgttcgacggcaaaaagatcactgtaacagggaccctgtggaacggcaacaaaattatcgacgagcgcctgatcaaccccgacggctccctgctgttccgagtaaccatcaacgtt

SEQ ID NO: 1506 - protein, 158 aa, Artificial Sequence
  Synthetic
VFTLEDFVGDWRQTAAYNNDQVLEQGGVSSLFQNLAVSVTPIQRIVLSGENALKIDIHVIIPYEGLSADQMAQIEKIFKVVYPVDDHHFKVILHYGTLVIDGVTPNMIDYFGRPYEGIAVFDGKKITVTGTLWNGNKIIDERLINPDGSLLFRVTINV

SEQ ID NO: 1507 - DNA, 474 bp, Artificial Sequence
  Synthetic
gtcttcacactcgaagatttcgttggggactggcgacagacagccgcctacaaccccgaccaagtccttgaacagggaggtgtgtccagtttgtttcagaatctcgccgtgtccgtaactccgatccaaaggattgtcctgagcggtgaaaatgccctgaagatcgacatccatgtcatcatcccgtatgaaggtctgagcgccgaccaaatggcccagatcgaaaaaatttttaaggtggtgtaccctgtggatgatcatcactttaaggtgatcctgcactatggcacactggtaatcgacggggttacgccgaacatgatcgactatttcggacggccgtatgaaggcatcgccgtgttcgacggcaaaaagatcactgtaacagggaccctgtggaacggcaacaaaattatcgacgagcgcctgatcaaccccgacggctccctgctgttccgagtaaccatcaacgtt

SEQ ID NO: 1508 - protein, 158 aa, Artificial Sequence
  Synthetic
VFTLEDFVGDWRQTAAYNPDQVLEQGGVSSLFQNLAVSVTPIQRIVLSGENALKIDIHVIIPYEGLSADQMAQIEKIFKVVYPVDDHHFKVILHYGTLVIDGVTPNMIDYFGRPYEGIAVFDGKKITVTGTLWNGNKIIDERLINPDGSLLFRVTINV

SEQ ID NO: 1509 - DNA, 474 bp, Artificial Sequence
  Synthetic
gtcttcacactcgaagatttcgttggggactggcgacagacagccgcctacaaccaggaccaagtccttgaacagggaggtgtgtccagtttgtttcagaatctcgccgtgtccgtaactccgatccaaaggattgtcctgagcggtgaaaatgccctgaagatcgacatccatgtcatcatcccgtatgaaggtctgagcgccgaccaaatggcccagatcgaaaaaatttttaaggtggtgtaccctgtggatgatcatcactttaaggtgatcctgcactatggcacactggtaatcgacggggttacgccgaacatgatcgactatttcggacggccgtatgaaggcatcgccgtgttcgacggcaaaaagatcactgtaacagggaccctgtggaacggcaacaaaattatcgacgagcgcctgatcaaccccgacggctccctgctgttccgagtaaccatcaacgtt

SEQ ID NO: 1510 - protein, 158 aa, Artificial Sequence
  Synthetic
VFTLEDFVGDWRQTAAYNQDQVLEQGGVSSLFQNLAVSVTPIQRIVLSGENALKIDIHVIIPYEGLSADQMAQIEKIFKVVYPVDDHHFKVILHYGTLVIDGVTPNMIDYFGRPYEGIAVFDGKKITVTGTLWNGNKIIDERLINPDGSLLFRVTINV

SEQ ID NO: 1511 - DNA, 474 bp, Artificial Sequence
  Synthetic
gtcttcacactcgaagatttcgttggggactggcgacagacagccgcctacaaccgggaccaagtccttgaacagggaggtgtgtccagtttgtttcagaatctcgccgtgtccgtaactccgatccaaaggattgtcctgagcggtgaaaatgccctgaagatcgacatccatgtcatcatcccgtatgaaggtctgagcgccgaccaaatggcccagatcgaaaaaatttttaaggtggtgtaccctgtggatgatcatcactttaaggtgatcctgcactatggcacactggtaatcgacggggttacgccgaacatgatcgactatttcggacggccgtatgaaggcatcgccgtgttcgacggcaaaaagatcactgtaacagggaccctgtggaacggcaacaaaattatcgacgagcgcctgatcaaccccgacggctccctgctgttccgagtaaccatcaacgtt

SEQ ID NO: 1512 - protein, 158 aa, Artificial Sequence
  Synthetic
VFTLEDFVGDWRQTAAYNRDQVLEQGGVSSLFQNLAVSVTPIQRIVLSGENALKIDIHVIIPYEGLSADQMAQIEKIFKVVYPVDDHHFKVILHYGTLVIDGVTPNMIDYFGRPYEGIAVFDGKKITVTGTLWNGNKIIDERLINPDGSLLFRVTINV

SEQ ID NO: 1513 - DNA, 474 bp, Artificial Sequence
  Synthetic
gtcttcacactcgaagatttcgttggggactggcgacagacagccgcctacaacagcgaccaagtccttgaacagggaggtgtgtccagtttgtttcagaatctcgccgtgtccgtaactccgatccaaaggattgtcctgagcggtgaaaatgccctgaagatcgacatccatgtcatcatcccgtatgaaggtctgagcgccgaccaaatggcccagatcgaaaaaatttttaaggtggtgtaccctgtggatgatcatcactttaaggtgatcctgcactatggcacactggtaatcgacggggttacgccgaacatgatcgactatttcggacggccgtatgaaggcatcgccgtgttcgacggcaaaaagatcactgtaacagggaccctgtggaacggcaacaaaattatcgacgagcgcctgatcaaccccgacggctccctgctgttccgagtaaccatcaacgtt

SEQ ID NO: 1514 - protein, 158 aa, Artificial Sequence
  Synthetic
VFTLEDFVGDWRQTAAYNSDQVLEQGGVSSLFQNLAVSVTPIQRIVLSGENALKIDIHVIIPYEGLSADQMAQIEKIFKVVYPVDDHHFKVILHYGTLVIDGVTPNMIDYFGRPYEGIAVFDGKKITVTGTLWNGNKIIDERLINPDGSLLFRVTINV

SEQ ID NO: 1515 - DNA, 474 bp, Artificial Sequence
  Synthetic
gtcttcacactcgaagatttcgttggggactggcgacagacagccgcctacaacaccgaccaagtccttgaacagggaggtgtgtccagtttgtttcagaatctcgccgtgtccgtaactccgatccaaaggattgtcctgagcggtgaaaatgccctgaagatcgacatccatgtcatcatcccgtatgaaggtctgagcgccgaccaaatggcccagatcgaaaaaatttttaaggtggtgtaccctgtggatgatcatcactttaaggtgatcctgcactatggcacactggtaatcgacggggttacgccgaacatgatcgactatttcggacggccgtatgaaggcatcgccgtgttcgacggcaaaaagatcactgtaacagggaccctgtggaacggcaacaaaattatcgacgagcgcctgatcaaccccgacggctccctgctgttccgagtaaccatcaacgtt

SEQ ID NO: 1516 - protein, 158 aa, Artificial Sequence
  Synthetic
VFTLEDFVGDWRQTAAYNTDQVLEQGGVSSLFQNLAVSVTPIQRIVLSGENALKIDIHVIIPYEGLSADQMAQIEKIFKVVYPVDDHHFKVILHYGTLVIDGVTPNMIDYFGRPYEGIAVFDGKKITVTGTLWNGNKIIDERLINPDGSLLFRVTINV

SEQ ID NO: 1517 - DNA, 474 bp, Artificial Sequence
  Synthetic
gtcttcacactcgaagatttcgttggggactggcgacagacagccgcctacaacgtggaccaagtccttgaacagggaggtgtgtccagtttgtttcagaatctcgccgtgtccgtaactccgatccaaaggattgtcctgagcggtgaaaatgccctgaagatcgacatccatgtcatcatcccgtatgaaggtctgagcgccgaccaaatggcccagatcgaaaaaatttttaaggtggtgtaccctgtggatgatcatcactttaaggtgatcctgcactatggcacactggtaatcgacggggttacgccgaacatgatcgactatttcggacggccgtatgaaggcatcgccgtgttcgacggcaaaaagatcactgtaacagggaccctgtggaacggcaacaaaattatcgacgagcgcctgatcaaccccgacggctccctgctgttccgagtaaccatcaacgtt

SEQ ID NO: 1518 - protein, 158 aa, Artificial Sequence
  Synthetic
VFTLEDFVGDWRQTAAYNVDQVLEQGGVSSLFQNLAVSVTPIQRIVLSGENALKIDIHVIIPYEGLSADQMAQIEKIFKVVYPVDDHHFKVILHYGTLVIDGVTPNMIDYFGRPYEGIAVFDGKKITVTGTLWNGNKIIDERLINPDGSLLFRVTINV

SEQ ID NO: 1519 - DNA, 474 bp, Artificial Sequence
  Synthetic
gtcttcacactcgaagatttcgttggggactggcgacagacagccgcctacaactgggaccaagtccttgaacagggaggtgtgtccagtttgtttcagaatctcgccgtgtccgtaactccgatccaaaggattgtcctgagcggtgaaaatgccctgaagatcgacatccatgtcatcatcccgtatgaaggtctgagcgccgaccaaatggcccagatcgaaaaaatttttaaggtggtgtaccctgtggatgatcatcactttaaggtgatcctgcactatggcacactggtaatcgacggggttacgccgaacatgatcgactatttcggacggccgtatgaaggcatcgccgtgttcgacggcaaaaagatcactgtaacagggaccctgtggaacggcaacaaaattatcgacgagcgcctgatcaaccccgacggctccctgctgttccgagtaaccatcaacgtt

SEQ ID NO: 1520 - protein, 158 aa, Artificial Sequence
  Synthetic
VFTLEDFVGDWRQTAAYNWDQVLEQGGVSSLFQNLAVSVTPIQRIVLSGENALKIDIHVIIPYEGLSADQMAQIEKIFKVVYPVDDHHFKVILHYGTLVIDGVTPNMIDYFGRPYEGIAVFDGKKITVTGTLWNGNKIIDERLINPDGSLLFRVTINV

SEQ ID NO: 1521 - DNA, 474 bp, Artificial Sequence
  Synthetic
gtcttcacactcgaagatttcgttggggactggcgacagacagccgcctacaactacgaccaagtccttgaacagggaggtgtgtccagtttgtttcagaatctcgccgtgtccgtaactccgatccaaaggattgtcctgagcggtgaaaatgccctgaagatcgacatccatgtcatcatcccgtatgaaggtctgagcgccgaccaaatggcccagatcgaaaaaatttttaaggtggtgtaccctgtggatgatcatcactttaaggtgatcctgcactatggcacactggtaatcgacggggttacgccgaacatgatcgactatttcggacggccgtatgaaggcatcgccgtgttcgacggcaaaaagatcactgtaacagggaccctgtggaacggcaacaaaattatcgacgagcgcctgatcaaccccgacggctccctgctgttccgagtaaccatcaacgtt

SEQ ID NO: 1522 - protein, 158 aa, Artificial Sequence
  Synthetic
VFTLEDFVGDWRQTAAYNYDQVLEQGGVSSLFQNLAVSVTPIQRIVLSGENALKIDIHVIIPYEGLSADQMAQIEKIFKVVYPVDDHHFKVILHYGTLVIDGVTPNMIDYFGRPYEGIAVFDGKKITVTGTLWNGNKIIDERLINPDGSLLFRVTINV

SEQ ID NO: 1523 - DNA, 474 bp, Artificial Sequence
  Synthetic
gtcttcacactcgaagatttcgttggggactggcgacagacagccgcctacaacctggaccaagtccttgaacagggaggtgtgtccagtttggcccagaatctcgccgtgtccgtaactccgatccaaaggattgtcctgagcggtgaaaatgccctgaagatcgacatccatgtcatcatcccgtatgaaggtctgagcgccgaccaaatggcccagatcgaaaaaatttttaaggtggtgtaccctgtggatgatcatcactttaaggtgatcctgcactatggcacactggtaatcgacggggttacgccgaacatgatcgactatttcggacggccgtatgaaggcatcgccgtgttcgacggcaaaaagatcactgtaacagggaccctgtggaacggcaacaaaattatcgacgagcgcctgatcaaccccgacggctccctgctgttccgagtaaccatcaacgtt

SEQ ID NO: 1524 - protein, 158 aa, Artificial Sequence
  Synthetic
VFTLEDFVGDWRQTAAYNLDQVLEQGGVSSLAQNLAVSVTPIQRIVLSGENALKIDIHVIIPYEGLSADQMAQIEKIFKVVYPVDDHHFKVILHYGTLVIDGVTPNMIDYFGRPYEGIAVFDGKKITVTGTLWNGNKIIDERLINPDGSLLFRVTINV

SEQ ID NO: 1525 - DNA, 474 bp, Artificial Sequence
  Synthetic
gtcttcacactcgaagatttcgttggggactggcgacagacagccgcctacaacctggaccaagtccttgaacagggaggtgtgtccagtttgtgccagaatctcgccgtgtccgtaactccgatccaaaggattgtcctgagcggtgaaaatgccctgaagatcgacatccatgtcatcatcccgtatgaaggtctgagcgccgaccaaatggcccagatcgaaaaaatttttaaggtggtgtaccctgtggatgatcatcactttaaggtgatcctgcactatggcacactggtaatcgacggggttacgccgaacatgatcgactatttcggacggccgtatgaaggcatcgccgtgttcgacggcaaaaagatcactgtaacagggaccctgtggaacggcaacaaaattatcgacgagcgcctgatcaaccccgacggctccctgctgttccgagtaaccatcaacgtt

SEQ ID NO: 1526 - protein, 158 aa, Artificial Sequence
  Synthetic
VFTLEDFVGDWRQTAAYNLDQVLEQGGVSSLCQNLAVSVTPIQRIVLSGENALKIDIHVIIPYEGLSADQMAQIEKIFKVVYPVDDHHFKVILHYGTLVIDGVTPNMIDYFGRPYEGIAVFDGKKITVTGTLWNGNKIIDERLINPDGSLLFRVTINV

SEQ ID NO: 1527 - DNA, 474 bp, Artificial Sequence
  Synthetic
gtcttcacactcgaagatttcgttggggactggcgacagacagccgcctacaacctggaccaagtccttgaacagggaggtgtgtccagtttggaccagaatctcgccgtgtccgtaactccgatccaaaggattgtcctgagcggtgaaaatgccctgaagatcgacatccatgtcatcatcccgtatgaaggtctgagcgccgaccaaatggcccagatcgaaaaaatttttaaggtggtgtaccctgtggatgatcatcactttaaggtgatcctgcactatggcacactggtaatcgacggggttacgccgaacatgatcgactatttcggacggccgtatgaaggcatcgccgtgttcgacggcaaaaagatcactgtaacagggaccctgtggaacggcaacaaaattatcgacgagcgcctgatcaaccccgacggctccctgctgttccgagtaaccatcaacgtt

SEQ ID NO: 1528 - protein, 158 aa, Artificial Sequence
  Synthetic
VFTLEDFVGDWRQTAAYNLDQVLEQGGVSSLDQNLAVSVTPIQRIVLSGENALKIDIHVIIPYEGLSADQMAQIEKIFKVVYPVDDHHFKVILHYGTLVIDGVTPNMIDYFGRPYEGIAVFDGKKITVTGTLWNGNKIIDERLINPDGSLLFRVTINV

SEQ ID NO: 1529 - DNA, 474 bp, Artificial Sequence
  Synthetic
gtcttcacactcgaagatttcgttggggactggcgacagacagccgcctacaacctggaccaagtccttgaacagggaggtgtgtccagtttggagcagaatctcgccgtgtccgtaactccgatccaaaggattgtcctgagcggtgaaaatgccctgaagatcgacatccatgtcatcatcccgtatgaaggtctgagcgccgaccaaatggcccagatcgaaaaaatttttaaggtggtgtaccctgtggatgatcatcactttaaggtgatcctgcactatggcacactggtaatcgacggggttacgccgaacatgatcgactatttcggacggccgtatgaaggcatcgccgtgttcgacggcaaaaagatcactgtaacagggaccctgtggaacggcaacaaaattatcgacgagcgcctgatcaaccccgacggctccctgctgttccgagtaaccatcaacgtt

SEQ ID NO: 1530 - protein, 158 aa, Artificial Sequence
  Synthetic
VFTLEDFVGDWRQTAAYNLDQVLEQGGVSSLEQNLAVSVTPIQRIVLSGENALKIDIHVIIPYEGLSADQMAQIEKIFKVVYPVDDHHFKVILHYGTLVIDGVTPNMIDYFGRPYEGIAVFDGKKITVTGTLWNGNKIIDERLINPDGSLLFRVTINV

SEQ ID NO: 1531 - DNA, 474 bp, Artificial Sequence
  Synthetic
gtcttcacactcgaagatttcgttggggactggcgacagacagccgcctacaacctggaccaagtccttgaacagggaggtgtgtccagtttgggccagaatctcgccgtgtccgtaactccgatccaaaggattgtcctgagcggtgaaaatgccctgaagatcgacatccatgtcatcatcccgtatgaaggtctgagcgccgaccaaatggcccagatcgaaaaaatttttaaggtggtgtaccctgtggatgatcatcactttaaggtgatcctgcactatggcacactggtaatcgacggggttacgccgaacatgatcgactatttcggacggccgtatgaaggcatcgccgtgttcgacggcaaaaagatcactgtaacagggaccctgtggaacggcaacaaaattatcgacgagcgcctgatcaaccccgacggctccctgctgttccgagtaaccatcaacgtt

SEQ ID NO: 1532 - protein, 158 aa, Artificial Sequence
  Synthetic
VFTLEDFVGDWRQTAAYNLDQVLEQGGVSSLGQNLAVSVTPIQRIVLSGENALKIDIHVIIPYEGLSADQMAQIEKIFKVVYPVDDHHFKVILHYGTLVIDGVTPNMIDYFGRPYEGIAVFDGKKITVTGTLWNGNKIIDERLINPDGSLLFRVTINV

SEQ ID NO: 1533 - DNA, 474 bp, Artificial Sequence
  Synthetic
gtcttcacactcgaagatttcgttggggactggcgacagacagccgcctacaacctggaccaagtccttgaacagggaggtgtgtccagtttgcaccagaatctcgccgtgtccgtaactccgatccaaaggattgtcctgagcggtgaaaatgccctgaagatcgacatccatgtcatcatcccgtatgaaggtctgagcgccgaccaaatggcccagatcgaaaaaatttttaaggtggtgtaccctgtggatgatcatcactttaaggtgatcctgcactatggcacactggtaatcgacggggttacgccgaacatgatcgactatttcggacggccgtatgaaggcatcgccgtgttcgacggcaaaaagatcactgtaacagggaccctgtggaacggcaacaaaattatcgacgagcgcctgatcaaccccgacggctccctgctgttccgagtaaccatcaacgtt

SEQ ID NO: 1534 - protein, 158 aa, Artificial Sequence
  Synthetic
VFTLEDFVGDWRQTAAYNLDQVLEQGGVSSLHQNLAVSVTPIQRIVLSGENALKIDIHVIIPYEGLSADQMAQIEKIFKVVYPVDDHHFKVILHYGTLVIDGVTPNMIDYFGRPYEGIAVFDGKKITVTGTLWNGNKIIDERLINPDGSLLFRVTINV

SEQ ID NO: 1535 - DNA, 474 bp, Artificial Sequence
  Synthetic
gtcttcacactcgaagatttcgttggggactggcgacagacagccgcctacaacctggaccaagtccttgaacagggaggtgtgtccagtttgatccagaatctcgccgtgtccgtaactccgatccaaaggattgtcctgagcggtgaaaatgccctgaagatcgacatccatgtcatcatcccgtatgaaggtctgagcgccgaccaaatggcccagatcgaaaaaatttttaaggtggtgtaccctgtggatgatcatcactttaaggtgatcctgcactatggcacactggtaatcgacggggttacgccgaacatgatcgactatttcggacggccgtatgaaggcatcgccgtgttcgacggcaaaaagatcactgtaacagggaccctgtggaacggcaacaaaattatcgacgagcgcctgatcaaccccgacggctccctgctgttccgagtaaccatcaacgtt

SEQ ID NO: 1536 - protein, 158 aa, Artificial Sequence
  Synthetic
VFTLEDFVGDWRQTAAYNLDQVLEQGGVSSLIQNLAVSVTPIQRIVLSGENALKIDIHVIIPYEGLSADQMAQIEKIFKVVYPVDDHHFKVILHYGTLVIDGVTPNMIDYFGRPYEGIAVFDGKKITVTGTLWNGNKIIDERLINPDGSLLFRVTINV

SEQ ID NO: 1537 - DNA, 474 bp, Artificial Sequence
  Synthetic
gtcttcacactcgaagatttcgttggggactggcgacagacagccgcctacaacctggaccaagtccttgaacagggaggtgtgtccagtttgaagcagaatctcgccgtgtccgtaactccgatccaaaggattgtcctgagcggtgaaaatgccctgaagatcgacatccatgtcatcatcccgtatgaaggtctgagcgccgaccaaatggcccagatcgaaaaaatttttaaggtggtgtaccctgtggatgatcatcactttaaggtgatcctgcactatggcacactggtaatcgacggggttacgccgaacatgatcgactatttcggacggccgtatgaaggcatcgccgtgttcgacggcaaaaagatcactgtaacagggaccctgtggaacggcaacaaaattatcgacgagcgcctgatcaaccccgacggctccctgctgttccgagtaaccatcaacgtt

SEQ ID NO: 1538 - protein, 158 aa, Artificial Sequence
  Synthetic
VFTLEDFVGDWRQTAAYNLDQVLEQGGVSSLKQNLAVSVTPIQRIVLSGENALKIDIHVIIPYEGLSADQMAQIEKIFKVVYPVDDHHFKVILHYGTLVIDGVTPNMIDYFGRPYEGIAVFDGKKITVTGTLWNGNKIIDERLINPDGSLLFRVTINV

SEQ ID NO: 1539 - DNA, 474 bp, Artificial Sequence
  Synthetic
gtcttcacactcgaagatttcgttggggactggcgacagacagccgcctacaacctggaccaagtccttgaacagggaggtgtgtccagtttgctgcagaatctcgccgtgtccgtaactccgatccaaaggattgtcctgagcggtgaaaatgccctgaagatcgacatccatgtcatcatcccgtatgaaggtctgagcgccgaccaaatggcccagatcgaaaaaatttttaaggtggtgtaccctgtggatgatcatcactttaaggtgatcctgcactatggcacactggtaatcgacggggttacgccgaacatgatcgactatttcggacggccgtatgaaggcatcgccgtgttcgacggcaaaaagatcactgtaacagggaccctgtggaacggcaacaaaattatcgacgagcgcctgatcaaccccgacggctccctgctgttccgagtaaccatcaacgtt

SEQ ID NO: 1540 - protein, 158 aa, Artificial Sequence
  Synthetic
VFTLEDFVGDWRQTAAYNLDQVLEQGGVSSLLQNLAVSVTPIQRIVLSGENALKIDIHVIIPYEGLSADQMAQIEKIFKVVYPVDDHHFKVILHYGTLVIDGVTPNMIDYFGRPYEGIAVFDGKKITVTGTLWNGNKIIDERLINPDGSLLFRVTINV

SEQ ID NO: 1541 - DNA, 474 bp, Artificial Sequence
  Synthetic
gtcttcacactcgaagatttcgttggggactggcgacagacagccgcctacaacctggaccaagtccttgaacagggaggtgtgtccagtttgatgcagaatctcgccgtgtccgtaactccgatccaaaggattgtcctgagcggtgaaaatgccctgaagatcgacatccatgtcatcatcccgtatgaaggtctgagcgccgaccaaatggcccagatcgaaaaaatttttaaggtggtgtaccctgtggatgatcatcactttaaggtgatcctgcactatggcacactggtaatcgacggggttacgccgaacatgatcgactatttcggacggccgtatgaaggcatcgccgtgttcgacggcaaaaagatcactgtaacagggaccctgtggaacggcaacaaaattatcgacgagcgcctgatcaaccccgacggctccctgctgttccgagtaaccatcaacgtt

SEQ ID NO: 1542 - protein, 158 aa, Artificial Sequence
  Synthetic
VFTLEDFVGDWRQTAAYNLDQVLEQGGVSSLMQNLAVSVTPIQRIVLSGENALKIDIHVIIPYEGLSADQMAQIEKIFKVVYPVDDHHFKVILHYGTLVIDGVTPNMIDYFGRPYEGIAVFDGKKITVTGTLWNGNKIIDERLINPDGSLLFRVTINV

SEQ ID NO: 1543 - DNA, 474 bp, Artificial Sequence
  Synthetic
gtcttcacactcgaagatttcgttggggactggcgacagacagccgcctacaacctggaccaagtccttgaacagggaggtgtgtccagtttgaaccagaatctcgccgtgtccgtaactccgatccaaaggattgtcctgagcggtgaaaatgccctgaagatcgacatccatgtcatcatcccgtatgaaggtctgagcgccgaccaaatggcccagatcgaaaaaatttttaaggtggtgtaccctgtggatgatcatcactttaaggtgatcctgcactatggcacactggtaatcgacggggttacgccgaacatgatcgactatttcggacggccgtatgaaggcatcgccgtgttcgacggcaaaaagatcactgtaacagggaccctgtggaacggcaacaaaattatcgacgagcgcctgatcaaccccgacggctccctgctgttccgagtaaccatcaacgtt

SEQ ID NO: 1544 - protein, 158 aa, Artificial Sequence
  Synthetic
VFTLEDFVGDWRQTAAYNLDQVLEQGGVSSLNQNLAVSVTPIQRIVLSGENALKIDIHVIIPYEGLSADQMAQIEKIFKVVYPVDDHHFKVILHYGTLVIDGVTPNMIDYFGRPYEGIAVFDGKKITVTGTLWNGNKIIDERLINPDGSLLFRVTINV

SEQ ID NO: 1545 - DNA, 474 bp, Artificial Sequence
  Synthetic
gtcttcacactcgaagatttcgttggggactggcgacagacagccgcctacaacctggaccaagtccttgaacagggaggtgtgtccagtttgccccagaatctcgccgtgtccgtaactccgatccaaaggattgtcctgagcggtgaaaatgccctgaagatcgacatccatgtcatcatcccgtatgaaggtctgagcgccgaccaaatggcccagatcgaaaaaatttttaaggtggtgtaccctgtggatgatcatcactttaaggtgatcctgcactatggcacactggtaatcgacggggttacgccgaacatgatcgactatttcggacggccgtatgaaggcatcgccgtgttcgacggcaaaaagatcactgtaacagggaccctgtggaacggcaacaaaattatcgacgagcgcctgatcaaccccgacggctccctgctgttccgagtaaccatcaacgtt

SEQ ID NO: 1546 - protein, 158 aa, Artificial Sequence
  Synthetic
VFTLEDFVGDWRQTAAYNLDQVLEQGGVSSLPQNLAVSVTPIQRIVLSGENALKIDIHVIIPYEGLSADQMAQIEKIFKVVYPVDDHHFKVILHYGTLVIDGVTPNMIDYFGRPYEGIAVFDGKKITVTGTLWNGNKIIDERLINPDGSLLFRVTINV

SEQ ID NO: 1547 - DNA, 474 bp, Artificial Sequence
  Synthetic
gtcttcacactcgaagatttcgttggggactggcgacagacagccgcctacaacctggaccaagtccttgaacagggaggtgtgtccagtttgcagcagaatctcgccgtgtccgtaactccgatccaaaggattgtcctgagcggtgaaaatgccctgaagatcgacatccatgtcatcatcccgtatgaaggtctgagcgccgaccaaatggcccagatcgaaaaaatttttaaggtggtgtaccctgtggatgatcatcactttaaggtgatcctgcactatggcacactggtaatcgacggggttacgccgaacatgatcgactatttcggacggccgtatgaaggcatcgccgtgttcgacggcaaaaagatcactgtaacagggaccctgtggaacggcaacaaaattatcgacgagcgcctgatcaaccccgacggctccctgctgttccgagtaaccatcaacgtt

SEQ ID NO: 1548 - protein, 158 aa, Artificial Sequence
  Synthetic
VFTLEDFVGDWRQTAAYNLDQVLEQGGVSSLQQNLAVSVTPIQRIVLSGENALKIDIHVIIPYEGLSADQMAQIEKIFKVVYPVDDHHFKVILHYGTLVIDGVTPNMIDYFGRPYEGIAVFDGKKITVTGTLWNGNKIIDERLINPDGSLLFRVTINV

SEQ ID NO: 1549 - DNA, 474 bp, Artificial Sequence
  Synthetic
gtcttcacactcgaagatttcgttggggactggcgacagacagccgcctacaacctggaccaagtccttgaacagggaggtgtgtccagtttgcggcagaatctcgccgtgtccgtaactccgatccaaaggattgtcctgagcggtgaaaatgccctgaagatcgacatccatgtcatcatcccgtatgaaggtctgagcgccgaccaaatggcccagatcgaaaaaatttttaaggtggtgtaccctgtggatgatcatcactttaaggtgatcctgcactatggcacactggtaatcgacggggttacgccgaacatgatcgactatttcggacggccgtatgaaggcatcgccgtgttcgacggcaaaaagatcactgtaacagggaccctgtggaacggcaacaaaattatcgacgagcgcctgatcaaccccgacggctccctgctgttccgagtaaccatcaacgtt

SEQ ID NO: 1550 - protein, 158 aa, Artificial Sequence
  Synthetic
VFTLEDFVGDWRQTAAYNLDQVLEQGGVSSLRQNLAVSVTPIQRIVLSGENALKIDIHVIIPYEGLSADQMAQIEKIFKVVYPVDDHHFKVILHYGTLVIDGVTPNMIDYFGRPYEGIAVFDGKKITVTGTLWNGNKIIDERLINPDGSLLFRVTINV

SEQ ID NO: 1551 - DNA, 474 bp, Artificial Sequence
  Synthetic
gtcttcacactcgaagatttcgttggggactggcgacagacagccgcctacaacctggaccaagtccttgaacagggaggtgtgtccagtttgagccagaatctcgccgtgtccgtaactccgatccaaaggattgtcctgagcggtgaaaatgccctgaagatcgacatccatgtcatcatcccgtatgaaggtctgagcgccgaccaaatggcccagatcgaaaaaatttttaaggtggtgtaccctgtggatgatcatcactttaaggtgatcctgcactatggcacactggtaatcgacggggttacgccgaacatgatcgactatttcggacggccgtatgaaggcatcgccgtgttcgacggcaaaaagatcactgtaacagggaccctgtggaacggcaacaaaattatcgacgagcgcctgatcaaccccgacggctccctgctgttccgagtaaccatcaacgtt

SEQ ID NO: 1552 - protein, 158 aa, Artificial Sequence
  Synthetic
VFTLEDFVGDWRQTAAYNLDQVLEQGGVSSLSQNLAVSVTPIQRIVLSGENALKIDIHVIIPYEGLSADQMAQIEKIFKVVYPVDDHHFKVILHYGTLVIDGVTPNMIDYFGRPYEGIAVFDGKKITVTGTLWNGNKIIDERLINPDGSLLFRVTINV

SEQ ID NO: 1553 - DNA, 474 bp, Artificial Sequence
  Synthetic
gtcttcacactcgaagatttcgttggggactggcgacagacagccgcctacaacctggaccaagtccttgaacagggaggtgtgtccagtttgacccagaatctcgccgtgtccgtaactccgatccaaaggattgtcctgagcggtgaaaatgccctgaagatcgacatccatgtcatcatcccgtatgaaggtctgagcgccgaccaaatggcccagatcgaaaaaatttttaaggtggtgtaccctgtggatgatcatcactttaaggtgatcctgcactatggcacactggtaatcgacggggttacgccgaacatgatcgactatttcggacggccgtatgaaggcatcgccgtgttcgacggcaaaaagatcactgtaacagggaccctgtggaacggcaacaaaattatcgacgagcgcctgatcaaccccgacggctccctgctgttccgagtaaccatcaacgtt

SEQ ID NO: 1554 - protein, 158 aa, Artificial Sequence
  Synthetic
VFTLEDFVGDWRQTAAYNLDQVLEQGGVSSLTQNLAVSVTPIQRIVLSGENALKIDIHVIIPYEGLSADQMAQIEKIFKVVYPVDDHHFKVILHYGTLVIDGVTPNMIDYFGRPYEGIAVFDGKKITVTGTLWNGNKIIDERLINPDGSLLFRVTINV

SEQ ID NO: 1555 - DNA, 474 bp, Artificial Sequence
  Synthetic
gtcttcacactcgaagatttcgttggggactggcgacagacagccgcctacaacctggaccaagtccttgaacagggaggtgtgtccagtttggtgcagaatctcgccgtgtccgtaactccgatccaaaggattgtcctgagcggtgaaaatgccctgaagatcgacatccatgtcatcatcccgtatgaaggtctgagcgccgaccaaatggcccagatcgaaaaaatttttaaggtggtgtaccctgtggatgatcatcactttaaggtgatcctgcactatggcacactggtaatcgacggggttacgccgaacatgatcgactatttcggacggccgtatgaaggcatcgccgtgttcgacggcaaaaagatcactgtaacagggaccctgtggaacggcaacaaaattatcgacgagcgcctgatcaaccccgacggctccctgctgttccgagtaaccatcaacgtt

SEQ ID NO: 1556 - protein, 158 aa, Artificial Sequence
  Synthetic
VFTLEDFVGDWRQTAAYNLDQVLEQGGVSSLVQNLAVSVTPIQRIVLSGENALKIDIHVIIPYEGLSADQMAQIEKIFKVVYPVDDHHFKVILHYGTLVIDGVTPNMIDYFGRPYEGIAVFDGKKITVTGTLWNGNKIIDERLINPDGSLLFRVTINV

SEQ ID NO: 1557 - DNA, 474 bp, Artificial Sequence
  Synthetic
gtcttcacactcgaagatttcgttggggactggcgacagacagccgcctacaacctggaccaagtccttgaacagggaggtgtgtccagtttgtggcagaatctcgccgtgtccgtaactccgatccaaaggattgtcctgagcggtgaaaatgccctgaagatcgacatccatgtcatcatcccgtatgaaggtctgagcgccgaccaaatggcccagatcgaaaaaatttttaaggtggtgtaccctgtggatgatcatcactttaaggtgatcctgcactatggcacactggtaatcgacggggttacgccgaacatgatcgactatttcggacggccgtatgaaggcatcgccgtgttcgacggcaaaaagatcactgtaacagggaccctgtggaacggcaacaaaattatcgacgagcgcctgatcaaccccgacggctccctgctgttccgagtaaccatcaacgtt

SEQ ID NO: 1558 - protein, 158 aa, Artificial Sequence
  Synthetic
VFTLEDFVGDWRQTAAYNLDQVLEQGGVSSLWQNLAVSVTPIQRIVLSGENALKIDIHVIIPYEGLSADQMAQIEKIFKVVYPVDDHHFKVILHYGTLVIDGVTPNMIDYFGRPYEGIAVFDGKKITVTGTLWNGNKIIDERLINPDGSLLFRVTINV

SEQ ID NO: 1559 - DNA, 474 bp, Artificial Sequence
  Synthetic
gtcttcacactcgaagatttcgttggggactggcgacagacagccgcctacaacctggaccaagtccttgaacagggaggtgtgtccagtttgtaccagaatctcgccgtgtccgtaactccgatccaaaggattgtcctgagcggtgaaaatgccctgaagatcgacatccatgtcatcatcccgtatgaaggtctgagcgccgaccaaatggcccagatcgaaaaaatttttaaggtggtgtaccctgtggatgatcatcactttaaggtgatcctgcactatggcacactggtaatcgacggggttacgccgaacatgatcgactatttcggacggccgtatgaaggcatcgccgtgttcgacggcaaaaagatcactgtaacagggaccctgtggaacggcaacaaaattatcgacgagcgcctgatcaaccccgacggctccctgctgttccgagtaaccatcaacgtt

SEQ ID NO: 1560 - protein, 158 aa, Artificial Sequence
  Synthetic
VFTLEDFVGDWRQTAAYNLDQVLEQGGVSSLYQNLAVSVTPIQRIVLSGENALKIDIHVIIPYEGLSADQMAQIEKIFKVVYPVDDHHFKVILHYGTLVIDGVTPNMIDYFGRPYEGIAVFDGKKITVTGTLWNGNKIIDERLINPDGSLLFRVTINV

SEQ ID NO: 1561 - DNA, 474 bp, Artificial Sequence
  Synthetic
gtcttcacactcgaagatttcgttggggactggcgacagacagccgcctacaacctggaccaagtccttgaacagggaggtgtgtccagtttgtttcagaatctcgccgtgtccgtaactccgatccaaaggattgtcctgagcggtgaaaatgccctgaagatcgacatccatgccatcatcccgtatgaaggtctgagcgccgaccaaatggcccagatcgaaaaaatttttaaggtggtgtaccctgtggatgatcatcactttaaggtgatcctgcactatggcacactggtaatcgacggggttacgccgaacatgatcgactatttcggacggccgtatgaaggcatcgccgtgttcgacggcaaaaagatcactgtaacagggaccctgtggaacggcaacaaaattatcgacgagcgcctgatcaaccccgacggctccctgctgttccgagtaaccatcaacgtt

SEQ ID NO: 1562 - protein, 158 aa, Artificial Sequence
  Synthetic
VFTLEDFVGDWRQTAAYNLDQVLEQGGVSSLFQNLAVSVTPIQRIVLSGENALKIDIHAIIPYEGLSADQMAQIEKIFKVVYPVDDHHFKVILHYGTLVIDGVTPNMIDYFGRPYEGIAVFDGKKITVTGTLWNGNKIIDERLINPDGSLLFRVTINV

SEQ ID NO: 1563 - DNA, 474 bp, Artificial Sequence
  Synthetic
gtcttcacactcgaagatttcgttggggactggcgacagacagccgcctacaacctggaccaagtccttgaacagggaggtgtgtccagtttgtttcagaatctcgccgtgtccgtaactccgatccaaaggattgtcctgagcggtgaaaatgccctgaagatcgacatccattgcatcatcccgtatgaaggtctgagcgccgaccaaatggcccagatcgaaaaaatttttaaggtggtgtaccctgtggatgatcatcactttaaggtgatcctgcactatggcacactggtaatcgacggggttacgccgaacatgatcgactatttcggacggccgtatgaaggcatcgccgtgttcgacggcaaaaagatcactgtaacagggaccctgtggaacggcaacaaaattatcgacgagcgcctgatcaaccccgacggctccctgctgttccgagtaaccatcaacgtt

SEQ ID NO: 1564 - protein, 158 aa, Artificial Sequence
  Synthetic
VFTLEDFVGDWRQTAAYNLDQVLEQGGVSSLFQNLAVSVTPIQRIVLSGENALKIDIHCIIPYEGLSADQMAQIEKIFKVVYPVDDHHFKVILHYGTLVIDGVTPNMIDYFGRPYEGIAVFDGKKITVTGTLWNGNKIIDERLINPDGSLLFRVTINV

SEQ ID NO: 1565 - DNA, 474 bp, Artificial Sequence
  Synthetic
gtcttcacactcgaagatttcgttggggactggcgacagacagccgcctacaacctggaccaagtccttgaacagggaggtgtgtccagtttgtttcagaatctcgccgtgtccgtaactccgatccaaaggattgtcctgagcggtgaaaatgccctgaagatcgacatccatgacatcatcccgtatgaaggtctgagcgccgaccaaatggcccagatcgaaaaaatttttaaggtggtgtaccctgtggatgatcatcactttaaggtgatcctgcactatggcacactggtaatcgacggggttacgccgaacatgatcgactatttcggacggccgtatgaaggcatcgccgtgttcgacggcaaaaagatcactgtaacagggaccctgtggaacggcaacaaaattatcgacgagcgcctgatcaaccccgacggctccctgctgttccgagtaaccatcaacgtt

SEQ ID NO: 1566 - protein, 158 aa, Artificial Sequence
  Synthetic
VFTLEDFVGDWRQTAAYNLDQVLEQGGVSSLFQNLAVSVTPIQRIVLSGENALKIDIHDIIPYEGLSADQMAQIEKIFKVVYPVDDHHFKVILHYGTLVIDGVTPNMIDYFGRPYEGIAVFDGKKITVTGTLWNGNKIIDERLINPDGSLLFRVTINV

SEQ ID NO: 1567 - DNA, 474 bp, Artificial Sequence
  Synthetic
gtcttcacactcgaagatttcgttggggactggcgacagacagccgcctacaacctggaccaagtccttgaacagggaggtgtgtccagtttgtttcagaatctcgccgtgtccgtaactccgatccaaaggattgtcctgagcggtgaaaatgccctgaagatcgacatccatgagatcatcccgtatgaaggtctgagcgccgaccaaatggcccagatcgaaaaaatttttaaggtggtgtaccctgtggatgatcatcactttaaggtgatcctgcactatggcacactggtaatcgacggggttacgccgaacatgatcgactatttcggacggccgtatgaaggcatcgccgtgttcgacggcaaaaagatcactgtaacagggaccctgtggaacggcaacaaaattatcgacgagcgcctgatcaaccccgacggctccctgctgttccgagtaaccatcaacgtt

SEQ ID NO: 1568 - protein, 158 aa, Artificial Sequence
  Synthetic
VFTLEDFVGDWRQTAAYNLDQVLEQGGVSSLFQNLAVSVTPIQRIVLSGENALKIDIHEIIPYEGLSADQMAQIEKIFKVVYPVDDHHFKVILHYGTLVIDGVTPNMIDYFGRPYEGIAVFDGKKITVTGTLWNGNKIIDERLINPDGSLLFRVTINV

SEQ ID NO: 1569 - DNA, 474 bp, Artificial Sequence
  Synthetic
gtcttcacactcgaagatttcgttggggactggcgacagacagccgcctacaacctggaccaagtccttgaacagggaggtgtgtccagtttgtttcagaatctcgccgtgtccgtaactccgatccaaaggattgtcctgagcggtgaaaatgccctgaagatcgacatccatttcatcatcccgtatgaaggtctgagcgccgaccaaatggcccagatcgaaaaaatttttaaggtggtgtaccctgtggatgatcatcactttaaggtgatcctgcactatggcacactggtaatcgacggggttacgccgaacatgatcgactatttcggacggccgtatgaaggcatcgccgtgttcgacggcaaaaagatcactgtaacagggaccctgtggaacggcaacaaaattatcgacgagcgcctgatcaaccccgacggctccctgctgttccgagtaaccatcaacgtt

SEQ ID NO: 1570 - protein, 158 aa, Artificial Sequence
  Synthetic
VFTLEDFVGDWRQTAAYNLDQVLEQGGVSSLFQNLAVSVTPIQRIVLSGENALKIDIHFIIPYEGLSADQMAQIEKIFKVVYPVDDHHFKVILHYGTLVIDGVTPNMIDYFGRPYEGIAVFDGKKITVTGTLWNGNKIIDERLINPDGSLLFRVTINV

SEQ ID NO: 1571 - DNA, 474 bp, Artificial Sequence
  Synthetic
gtcttcacactcgaagatttcgttggggactggcgacagacagccgcctacaacctggaccaagtccttgaacagggaggtgtgtccagtttgtttcagaatctcgccgtgtccgtaactccgatccaaaggattgtcctgagcggtgaaaatgccctgaagatcgacatccatggcatcatcccgtatgaaggtctgagcgccgaccaaatggcccagatcgaaaaaatttttaaggtggtgtaccctgtggatgatcatcactttaaggtgatcctgcactatggcacactggtaatcgacggggttacgccgaacatgatcgactatttcggacggccgtatgaaggcatcgccgtgttcgacggcaaaaagatcactgtaacagggaccctgtggaacggcaacaaaattatcgacgagcgcctgatcaaccccgacggctccctgctgttccgagtaaccatcaacgtt

SEQ ID NO: 1572 - protein, 158 aa, Artificial Sequence
  Synthetic
VFTLEDFVGDWRQTAAYNLDQVLEQGGVSSLFQNLAVSVTPIQRIVLSGENALKIDIHGIIPYEGLSADQMAQIEKIFKVVYPVDDHHFKVILHYGTLVIDGVTPNMIDYFGRPYEGIAVFDGKKITVTGTLWNGNKIIDERLINPDGSLLFRVTINV

SEQ ID NO: 1573 - DNA, 474 bp, Artificial Sequence
  Synthetic
gtcttcacactcgaagatttcgttggggactggcgacagacagccgcctacaacctggaccaagtccttgaacagggaggtgtgtccagtttgtttcagaatctcgccgtgtccgtaactccgatccaaaggattgtcctgagcggtgaaaatgccctgaagatcgacatccatcacatcatcccgtatgaaggtctgagcgccgaccaaatggcccagatcgaaaaaatttttaaggtggtgtaccctgtggatgatcatcactttaaggtgatcctgcactatggcacactggtaatcgacggggttacgccgaacatgatcgactatttcggacggccgtatgaaggcatcgccgtgttcgacggcaaaaagatcactgtaacagggaccctgtggaacggcaacaaaattatcgacgagcgcctgatcaaccccgacggctccctgctgttccgagtaaccatcaacgtt

SEQ ID NO: 1574 - protein, 158 aa, Artificial Sequence
  Synthetic
VFTLEDFVGDWRQTAAYNLDQVLEQGGVSSLFQNLAVSVTPIQRIVLSGENALKIDIHHIIPYEGLSADQMAQIEKIFKVVYPVDDHHFKVILHYGTLVIDGVTPNMIDYFGRPYEGIAVFDGKKITVTGTLWNGNKIIDERLINPDGSLLFRVTINV

SEQ ID NO: 1575 - DNA, 474 bp, Artificial Sequence
  Synthetic
gtcttcacactcgaagatttcgttggggactggcgacagacagccgcctacaacctggaccaagtccttgaacagggaggtgtgtccagtttgtttcagaatctcgccgtgtccgtaactccgatccaaaggattgtcctgagcggtgaaaatgccctgaagatcgacatccatatcatcatcccgtatgaaggtctgagcgccgaccaaatggcccagatcgaaaaaatttttaaggtggtgtaccctgtggatgatcatcactttaaggtgatcctgcactatggcacactggtaatcgacggggttacgccgaacatgatcgactatttcggacggccgtatgaaggcatcgccgtgttcgacggcaaaaagatcactgtaacagggaccctgtggaacggcaacaaaattatcgacgagcgcctgatcaaccccgacggctccctgctgttccgagtaaccatcaacgtt

SEQ ID NO: 1576 - protein, 158 aa, Artificial Sequence
  Synthetic
VFTLEDFVGDWRQTAAYNLDQVLEQGGVSSLFQNLAVSVTPIQRIVLSGENALKIDIHIIIPYEGLSADQMAQIEKIFKVVYPVDDHHFKVILHYGTLVIDGVTPNMIDYFGRPYEGIAVFDGKKITVTGTLWNGNKIIDERLINPDGSLLFRVTINV

SEQ ID NO: 1577 - DNA, 474 bp, Artificial Sequence
  Synthetic
gtcttcacactcgaagatttcgttggggactggcgacagacagccgcctacaacctggaccaagtccttgaacagggaggtgtgtccagtttgtttcagaatctcgccgtgtccgtaactccgatccaaaggattgtcctgagcggtgaaaatgccctgaagatcgacatccataagatcatcccgtatgaaggtctgagcgccgaccaaatggcccagatcgaaaaaatttttaaggtggtgtaccctgtggatgatcatcactttaaggtgatcctgcactatggcacactggtaatcgacggggttacgccgaacatgatcgactatttcggacggccgtatgaaggcatcgccgtgttcgacggcaaaaagatcactgtaacagggaccctgtggaacggcaacaaaattatcgacgagcgcctgatcaaccccgacggctccctgctgttccgagtaaccatcaacgtt

SEQ ID NO: 1578 - protein, 158 aa, Artificial Sequence
  Synthetic
VFTLEDFVGDWRQTAAYNLDQVLEQGGVSSLFQNLAVSVTPIQRIVLSGENALKIDIHKIIPYEGLSADQMAQIEKIFKVVYPVDDHHFKVILHYGTLVIDGVTPNMIDYFGRPYEGIAVFDGKKITVTGTLWNGNKIIDERLINPDGSLLFRVTINV

SEQ ID NO: 1579 - DNA, 474 bp, Artificial Sequence
  Synthetic
gtcttcacactcgaagatttcgttggggactggcgacagacagccgcctacaacctggaccaagtccttgaacagggaggtgtgtccagtttgtttcagaatctcgccgtgtccgtaactccgatccaaaggattgtcctgagcggtgaaaatgccctgaagatcgacatccatctgatcatcccgtatgaaggtctgagcgccgaccaaatggcccagatcgaaaaaatttttaaggtggtgtaccctgtggatgatcatcactttaaggtgatcctgcactatggcacactggtaatcgacggggttacgccgaacatgatcgactatttcggacggccgtatgaaggcatcgccgtgttcgacggcaaaaagatcactgtaacagggaccctgtggaacggcaacaaaattatcgacgagcgcctgatcaaccccgacggctccctgctgttccgagtaaccatcaacgtt

SEQ ID NO: 1580 - protein, 158 aa, Artificial Sequence
  Synthetic
VFTLEDFVGDWRQTAAYNLDQVLEQGGVSSLFQNLAVSVTPIQRIVLSGENALKIDIHLIIPYEGLSADQMAQIEKIFKVVYPVDDHHFKVILHYGTLVIDGVTPNMIDYFGRPYEGIAVFDGKKITVTGTLWNGNKIIDERLINPDGSLLFRVTINV

SEQ ID NO: 1581 - DNA, 474 bp, Artificial Sequence
  Synthetic
gtcttcacactcgaagatttcgttggggactggcgacagacagccgcctacaacctggaccaagtccttgaacagggaggtgtgtccagtttgtttcagaatctcgccgtgtccgtaactccgatccaaaggattgtcctgagcggtgaaaatgccctgaagatcgacatccatatgatcatcccgtatgaaggtctgagcgccgaccaaatggcccagatcgaaaaaatttttaaggtggtgtaccctgtggatgatcatcactttaaggtgatcctgcactatggcacactggtaatcgacggggttacgccgaacatgatcgactatttcggacggccgtatgaaggcatcgccgtgttcgacggcaaaaagatcactgtaacagggaccctgtggaacggcaacaaaattatcgacgagcgcctgatcaaccccgacggctccctgctgttccgagtaaccatcaacgtt

SEQ ID NO: 1582 - protein, 158 aa, Artificial Sequence
  Synthetic
VFTLEDFVGDWRQTAAYNLDQVLEQGGVSSLFQNLAVSVTPIQRIVLSGENALKIDIHMIIPYEGLSADQMAQIEKIFKVVYPVDDHHFKVILHYGTLVIDGVTPNMIDYFGRPYEGIAVFDGKKITVTGTLWNGNKIIDERLINPDGSLLFRVTINV

SEQ ID NO: 1583 - DNA, 474 bp, Artificial Sequence
  Synthetic
gtcttcacactcgaagatttcgttggggactggcgacagacagccgcctacaacctggaccaagtccttgaacagggaggtgtgtccagtttgtttcagaatctcgccgtgtccgtaactccgatccaaaggattgtcctgagcggtgaaaatgccctgaagatcgacatccataacatcatcccgtatgaaggtctgagcgccgaccaaatggcccagatcgaaaaaatttttaaggtggtgtaccctgtggatgatcatcactttaaggtgatcctgcactatggcacactggtaatcgacggggttacgccgaacatgatcgactatttcggacggccgtatgaaggcatcgccgtgttcgacggcaaaaagatcactgtaacagggaccctgtggaacggcaacaaaattatcgacgagcgcctgatcaaccccgacggctccctgctgttccgagtaaccatcaacgtt

SEQ ID NO: 1584 - protein, 158 aa, Artificial Sequence
  Synthetic
VFTLEDFVGDWRQTAAYNLDQVLEQGGVSSLFQNLAVSVTPIQRIVLSGENALKIDIHNIIPYEGLSADQMAQIEKIFKVVYPVDDHHFKVILHYGTLVIDGVTPNMIDYFGRPYEGIAVFDGKKITVTGTLWNGNKIIDERLINPDGSLLFRVTINV

SEQ ID NO: 1585 - DNA, 474 bp, Artificial Sequence
  Synthetic
gtcttcacactcgaagatttcgttggggactggcgacagacagccgcctacaacctggaccaagtccttgaacagggaggtgtgtccagtttgtttcagaatctcgccgtgtccgtaactccgatccaaaggattgtcctgagcggtgaaaatgccctgaagatcgacatccatcccatcatcccgtatgaaggtctgagcgccgaccaaatggcccagatcgaaaaaatttttaaggtggtgtaccctgtggatgatcatcactttaaggtgatcctgcactatggcacactggtaatcgacggggttacgccgaacatgatcgactatttcggacggccgtatgaaggcatcgccgtgttcgacggcaaaaagatcactgtaacagggaccctgtggaacggcaacaaaattatcgacgagcgcctgatcaaccccgacggctccctgctgttccgagtaaccatcaacgtt

SEQ ID NO: 1586 - protein, 158 aa, Artificial Sequence
  Synthetic
VFTLEDFVGDWRQTAAYNLDQVLEQGGVSSLFQNLAVSVTPIQRIVLSGENALKIDIHPIIPYEGLSADQMAQIEKIFKVVYPVDDHHFKVILHYGTLVIDGVTPNMIDYFGRPYEGIAVFDGKKITVTGTLWNGNKIIDERLINPDGSLLFRVTINV

SEQ ID NO: 1587 - DNA, 474 bp, Artificial Sequence
  Synthetic
gtcttcacactcgaagatttcgttggggactggcgacagacagccgcctacaacctggaccaagtccttgaacagggaggtgtgtccagtttgtttcagaatctcgccgtgtccgtaactccgatccaaaggattgtcctgagcggtgaaaatgccctgaagatcgacatccatcagatcatcccgtatgaaggtctgagcgccgaccaaatggcccagatcgaaaaaatttttaaggtggtgtaccctgtggatgatcatcactttaaggtgatcctgcactatggcacactggtaatcgacggggttacgccgaacatgatcgactatttcggacggccgtatgaaggcatcgccgtgttcgacggcaaaaagatcactgtaacagggaccctgtggaacggcaacaaaattatcgacgagcgcctgatcaaccccgacggctccctgctgttccgagtaaccatcaacgtt

SEQ ID NO: 1588 - protein, 158 aa, Artificial Sequence
  Synthetic
VFTLEDFVGDWRQTAAYNLDQVLEQGGVSSLFQNLAVSVTPIQRIVLSGENALKIDIHQIIPYEGLSADQMAQIEKIFKVVYPVDDHHFKVILHYGTLVIDGVTPNMIDYFGRPYEGIAVFDGKKITVTGTLWNGNKIIDERLINPDGSLLFRVTINV

SEQ ID NO: 1589 - DNA, 474 bp, Artificial Sequence
  Synthetic
gtcttcacactcgaagatttcgttggggactggcgacagacagccgcctacaacctggaccaagtccttgaacagggaggtgtgtccagtttgtttcagaatctcgccgtgtccgtaactccgatccaaaggattgtcctgagcggtgaaaatgccctgaagatcgacatccatcggatcatcccgtatgaaggtctgagcgccgaccaaatggcccagatcgaaaaaatttttaaggtggtgtaccctgtggatgatcatcactttaaggtgatcctgcactatggcacactggtaatcgacggggttacgccgaacatgatcgactatttcggacggccgtatgaaggcatcgccgtgttcgacggcaaaaagatcactgtaacagggaccctgtggaacggcaacaaaattatcgacgagcgcctgatcaaccccgacggctccctgctgttccgagtaaccatcaacgtt

SEQ ID NO: 1590 - protein, 158 aa, Artificial Sequence
  Synthetic
VFTLEDFVGDWRQTAAYNLDQVLEQGGVSSLFQNLAVSVTPIQRIVLSGENALKIDIHRIIPYEGLSADQMAQIEKIFKVVYPVDDHHFKVILHYGTLVIDGVTPNMIDYFGRPYEGIAVFDGKKITVTGTLWNGNKIIDERLINPDGSLLFRVTINV

SEQ ID NO: 1591 - DNA, 474 bp, Artificial Sequence
  Synthetic
gtcttcacactcgaagatttcgttggggactggcgacagacagccgcctacaacctggaccaagtccttgaacagggaggtgtgtccagtttgtttcagaatctcgccgtgtccgtaactccgatccaaaggattgtcctgagcggtgaaaatgccctgaagatcgacatccatagcatcatcccgtatgaaggtctgagcgccgaccaaatggcccagatcgaaaaaatttttaaggtggtgtaccctgtggatgatcatcactttaaggtgatcctgcactatggcacactggtaatcgacggggttacgccgaacatgatcgactatttcggacggccgtatgaaggcatcgccgtgttcgacggcaaaaagatcactgtaacagggaccctgtggaacggcaacaaaattatcgacgagcgcctgatcaaccccgacggctccctgctgttccgagtaaccatcaacgtt

SEQ ID NO: 1592 - protein, 158 aa, Artificial Sequence
  Synthetic
VFTLEDFVGDWRQTAAYNLDQVLEQGGVSSLFQNLAVSVTPIQRIVLSGENALKIDIHSIIPYEGLSADQMAQIEKIFKVVYPVDDHHFKVILHYGTLVIDGVTPNMIDYFGRPYEGIAVFDGKKITVTGTLWNGNKIIDERLINPDGSLLFRVTINV

SEQ ID NO: 1593 - DNA, 474 bp, Artificial Sequence
  Synthetic
gtcttcacactcgaagatttcgttggggactggcgacagacagccgcctacaacctggaccaagtccttgaacagggaggtgtgtccagtttgtttcagaatctcgccgtgtccgtaactccgatccaaaggattgtcctgagcggtgaaaatgccctgaagatcgacatccataccatcatcccgtatgaaggtctgagcgccgaccaaatggcccagatcgaaaaaatttttaaggtggtgtaccctgtggatgatcatcactttaaggtgatcctgcactatggcacactggtaatcgacggggttacgccgaacatgatcgactatttcggacggccgtatgaaggcatcgccgtgttcgacggcaaaaagatcactgtaacagggaccctgtggaacggcaacaaaattatcgacgagcgcctgatcaaccccgacggctccctgctgttccgagtaaccatcaacgtt

SEQ ID NO: 1594 - protein, 158 aa, Artificial Sequence
  Synthetic
VFTLEDFVGDWRQTAAYNLDQVLEQGGVSSLFQNLAVSVTPIQRIVLSGENALKIDIHTIIPYEGLSADQMAQIEKIFKVVYPVDDHHFKVILHYGTLVIDGVTPNMIDYFGRPYEGIAVFDGKKITVTGTLWNGNKIIDERLINPDGSLLFRVTINV

SEQ ID NO: 1595 - DNA, 474 bp, Artificial Sequence
  Synthetic
gtcttcacactcgaagatttcgttggggactggcgacagacagccgcctacaacctggaccaagtccttgaacagggaggtgtgtccagtttgtttcagaatctcgccgtgtccgtaactccgatccaaaggattgtcctgagcggtgaaaatgccctgaagatcgacatccattggatcatcccgtatgaaggtctgagcgccgaccaaatggcccagatcgaaaaaatttttaaggtggtgtaccctgtggatgatcatcactttaaggtgatcctgcactatggcacactggtaatcgacggggttacgccgaacatgatcgactatttcggacggccgtatgaaggcatcgccgtgttcgacggcaaaaagatcactgtaacagggaccctgtggaacggcaacaaaattatcgacgagcgcctgatcaaccccgacggctccctgctgttccgagtaaccatcaacgtt

SEQ ID NO: 1596 - protein, 158 aa, Artificial Sequence
  Synthetic
VFTLEDFVGDWRQTAAYNLDQVLEQGGVSSLFQNLAVSVTPIQRIVLSGENALKIDIHWIIPYEGLSADQMAQIEKIFKVVYPVDDHHFKVILHYGTLVIDGVTPNMIDYFGRPYEGIAVFDGKKITVTGTLWNGNKIIDERLINPDGSLLFRVTINV

SEQ ID NO: 1597 - DNA, 474 bp, Artificial Sequence
  Synthetic
gtcttcacactcgaagatttcgttggggactggcgacagacagccgcctacaacctggaccaagtccttgaacagggaggtgtgtccagtttgtttcagaatctcgccgtgtccgtaactccgatccaaaggattgtcctgagcggtgaaaatgccctgaagatcgacatccattacatcatcccgtatgaaggtctgagcgccgaccaaatggcccagatcgaaaaaatttttaaggtggtgtaccctgtggatgatcatcactttaaggtgatcctgcactatggcacactggtaatcgacggggttacgccgaacatgatcgactatttcggacggccgtatgaaggcatcgccgtgttcgacggcaaaaagatcactgtaacagggaccctgtggaacggcaacaaaattatcgacgagcgcctgatcaaccccgacggctccctgctgttccgagtaaccatcaacgtt

SEQ ID NO: 1598 - protein, 158 aa, Artificial Sequence
  Synthetic
VFTLEDFVGDWRQTAAYNLDQVLEQGGVSSLFQNLAVSVTPIQRIVLSGENALKIDIHYIIPYEGLSADQMAQIEKIFKVVYPVDDHHFKVILHYGTLVIDGVTPNMIDYFGRPYEGIAVFDGKKITVTGTLWNGNKIIDERLINPDGSLLFRVTINV

SEQ ID NO: 1599 - DNA, 474 bp, Artificial Sequence
  Synthetic
gtcttcacactcgaagatttcgttggggactggcgacagacagccgcctacaacctggaccaagtccttgaacagggaggtgtgtccagtttgtttcagaatctcgccgtgtccgtaactccgatccaaaggattgtcctgagcggtgaaaatgccctgaagatcgacatccatgtcatcatcccgtatgaaggtctgagctgcgaccaaatggcccagatcgaaaaaatttttaaggtggtgtaccctgtggatgatcatcactttaaggtgatcctgcactatggcacactggtaatcgacggggttacgccgaacatgatcgactatttcggacggccgtatgaaggcatcgccgtgttcgacggcaaaaagatcactgtaacagggaccctgtggaacggcaacaaaattatcgacgagcgcctgatcaaccccgacggctccctgctgttccgagtaaccatcaacgtt

SEQ ID NO: 1600 - protein, 158 aa, Artificial Sequence
  Synthetic
VFTLEDFVGDWRQTAAYNLDQVLEQGGVSSLFQNLAVSVTPIQRIVLSGENALKIDIHVIIPYEGLSCDQMAQIEKIFKVVYPVDDHHFKVILHYGTLVIDGVTPNMIDYFGRPYEGIAVFDGKKITVTGTLWNGNKIIDERLINPDGSLLFRVTINV

SEQ ID NO: 1601 - DNA, 474 bp, Artificial Sequence
  Synthetic
gtcttcacactcgaagatttcgttggggactggcgacagacagccgcctacaacctggaccaagtccttgaacagggaggtgtgtccagtttgtttcagaatctcgccgtgtccgtaactccgatccaaaggattgtcctgagcggtgaaaatgccctgaagatcgacatccatgtcatcatcccgtatgaaggtctgagcgacgaccaaatggcccagatcgaaaaaatttttaaggtggtgtaccctgtggatgatcatcactttaaggtgatcctgcactatggcacactggtaatcgacggggttacgccgaacatgatcgactatttcggacggccgtatgaaggcatcgccgtgttcgacggcaaaaagatcactgtaacagggaccctgtggaacggcaacaaaattatcgacgagcgcctgatcaaccccgacggctccctgctgttccgagtaaccatcaacgtt

SEQ ID NO: 1602 - protein, 158 aa, Artificial Sequence
  Synthetic
VFTLEDFVGDWRQTAAYNLDQVLEQGGVSSLFQNLAVSVTPIQRIVLSGENALKIDIHVIIPYEGLSDDQMAQIEKIFKVVYPVDDHHFKVILHYGTLVIDGVTPNMIDYFGRPYEGIAVFDGKKITVTGTLWNGNKIIDERLINPDGSLLFRVTINV

SEQ ID NO: 1603 - DNA, 474 bp, Artificial Sequence
  Synthetic
gtcttcacactcgaagatttcgttggggactggcgacagacagccgcctacaacctggaccaagtccttgaacagggaggtgtgtccagtttgtttcagaatctcgccgtgtccgtaactccgatccaaaggattgtcctgagcggtgaaaatgccctgaagatcgacatccatgtcatcatcccgtatgaaggtctgagcgaggaccaaatggcccagatcgaaaaaatttttaaggtggtgtaccctgtggatgatcatcactttaaggtgatcctgcactatggcacactggtaatcgacggggttacgccgaacatgatcgactatttcggacggccgtatgaaggcatcgccgtgttcgacggcaaaaagatcactgtaacagggaccctgtggaacggcaacaaaattatcgacgagcgcctgatcaaccccgacggctccctgctgttccgagtaaccatcaacgtt

SEQ ID NO: 1604 - protein, 158 aa, Artificial Sequence
  Synthetic
VFTLEDFVGDWRQTAAYNLDQVLEQGGVSSLFQNLAVSVTPIQRIVLSGENALKIDIHVIIPYEGLSEDQMAQIEKIFKVVYPVDDHHFKVILHYGTLVIDGVTPNMIDYFGRPYEGIAVFDGKKITVTGTLWNGNKIIDERLINPDGSLLFRVTINV

SEQ ID NO: 1605 - DNA, 474 bp, Artificial Sequence
  Synthetic
gtcttcacactcgaagatttcgttggggactggcgacagacagccgcctacaacctggaccaagtccttgaacagggaggtgtgtccagtttgtttcagaatctcgccgtgtccgtaactccgatccaaaggattgtcctgagcggtgaaaatgccctgaagatcgacatccatgtcatcatcccgtatgaaggtctgagcttcgaccaaatggcccagatcgaaaaaatttttaaggtggtgtaccctgtggatgatcatcactttaaggtgatcctgcactatggcacactggtaatcgacggggttacgccgaacatgatcgactatttcggacggccgtatgaaggcatcgccgtgttcgacggcaaaaagatcactgtaacagggaccctgtggaacggcaacaaaattatcgacgagcgcctgatcaaccccgacggctccctgctgttccgagtaaccatcaacgtt

SEQ ID NO: 1606 - protein, 158 aa, Artificial Sequence
  Synthetic
VFTLEDFVGDWRQTAAYNLDQVLEQGGVSSLFQNLAVSVTPIQRIVLSGENALKIDIHVIIPYEGLSFDQMAQIEKIFKVVYPVDDHHFKVILHYGTLVIDGVTPNMIDYFGRPYEGIAVFDGKKITVTGTLWNGNKIIDERLINPDGSLLFRVTINV

SEQ ID NO: 1607 - DNA, 474 bp, Artificial Sequence; identical to SEQ ID NO: 1405
  Synthetic

SEQ ID NO: 1608 - protein, 158 aa, Artificial Sequence; identical to SEQ ID NO: 1406
  Synthetic

SEQ ID NO: 1609 - DNA, 474 bp, Artificial Sequence
  Synthetic
gtcttcacactcgaagatttcgttggggactggcgacagacagccgcctacaacctggaccaagtccttgaacagggaggtgtgtccagtttgtttcagaatctcgccgtgtccgtaactccgatccaaaggattgtcctgagcggtgaaaatgccctgaagatcgacatccatgtcatcatcccgtatgaaggtctgagccacgaccaaatggcccagatcgaaaaaatttttaaggtggtgtaccctgtggatgatcatcactttaaggtgatcctgcactatggcacactggtaatcgacggggttacgccgaacatgatcgactatttcggacggccgtatgaaggcatcgccgtgttcgacggcaaaaagatcactgtaacagggaccctgtggaacggcaacaaaattatcgacgagcgcctgatcaaccccgacggctccctgctgttccgagtaaccatcaacgtt

SEQ ID NO: 1610 - protein, 158 aa, Artificial Sequence
  Synthetic
VFTLEDFVGDWRQTAAYNLDQVLEQGGVSSLFQNLAVSVTPIQRIVLSGENALKIDIHVIIPYEGLSHDQMAQIEKIFKVVYPVDDHHFKVILHYGTLVIDGVTPNMIDYFGRPYEGIAVFDGKKITVTGTLWNGNKIIDERLINPDGSLLFRVTINV

SEQ ID NO: 1611 - DNA, 474 bp, Artificial Sequence
  Synthetic
gtcttcacactcgaagatttcgttggggactggcgacagacagccgcctacaacctggaccaagtccttgaacagggaggtgtgtccagtttgtttcagaatctcgccgtgtccgtaactccgatccaaaggattgtcctgagcggtgaaaatgccctgaagatcgacatccatgtcatcatcccgtatgaaggtctgagcatcgaccaaatggcccagatcgaaaaaatttttaaggtggtgtaccctgtggatgatcatcactttaaggtgatcctgcactatggcacactggtaatcgacggggttacgccgaacatgatcgactatttcggacggccgtatgaaggcatcgccgtgttcgacggcaaaaagatcactgtaacagggaccctgtggaacggcaacaaaattatcgacgagcgcctgatcaaccccgacggctccctgctgttccgagtaaccatcaacgtt

SEQ ID NO: 1612 - protein, 158 aa, Artificial Sequence
  Synthetic
VFTLEDFVGDWRQTAAYNLDQVLEQGGVSSLFQNLAVSVTPIQRIVLSGENALKIDIHVIIPYEGLSIDQMAQIEKIFKVVYPVDDHHFKVILHYGTLVIDGVTPNMIDYFGRPYEGIAVFDGKKITVTGTLWNGNKIIDERLINPDGSLLFRVTINV

SEQ ID NO: 1613 - DNA, 474 bp, Artificial Sequence
  Synthetic
gtcttcacactcgaagatttcgttggggactggcgacagacagccgcctacaacctggaccaagtccttgaacagggaggtgtgtccagtttgtttcagaatctcgccgtgtccgtaactccgatccaaaggattgtcctgagcggtgaaaatgccctgaagatcgacatccatgtcatcatcccgtatgaaggtctgagcaaggaccaaatggcccagatcgaaaaaatttttaaggtggtgtaccctgtggatgatcatcactttaaggtgatcctgcactatggcacactggtaatcgacggggttacgccgaacatgatcgactatttcggacggccgtatgaaggcatcgccgtgttcgacggcaaaaagatcactgtaacagggaccctgtggaacggcaacaaaattatcgacgagcgcctgatcaaccccgacggctccctgctgttccgagtaaccatcaacgtt

SEQ ID NO: 1614 - protein, 158 aa, Artificial Sequence
  Synthetic
VFTLEDFVGDWRQTAAYNLDQVLEQGGVSSLFQNLAVSVTPIQRIVLSGENALKIDIHVIIPYEGLSKDQMAQIEKIFKVVYPVDDHHFKVILHYGTLVIDGVTPNMIDYFGRPYEGIAVFDGKKITVTGTLWNGNKIIDERLINPDGSLLFRVTINV

SEQ ID NO: 1615 - DNA, 474 bp, Artificial Sequence
  Synthetic
gtcttcacactcgaagatttcgttggggactggcgacagacagccgcctacaacctggaccaagtccttgaacagggaggtgtgtccagtttgtttcagaatctcgccgtgtccgtaactccgatccaaaggattgtcctgagcggtgaaaatgccctgaagatcgacatccatgtcatcatcccgtatgaaggtctgagcctggaccaaatggcccagatcgaaaaaatttttaaggtggtgtaccctgtggatgatcatcactttaaggtgatcctgcactatggcacactggtaatcgacggggttacgccgaacatgatcgactatttcggacggccgtatgaaggcatcgccgtgttcgacggcaaaaagatcactgtaacagggaccctgtggaacggcaacaaaattatcgacgagcgcctgatcaaccccgacggctccctgctgttccgagtaaccatcaacgtt

SEQ ID NO: 1616 - protein, 158 aa, Artificial Sequence
  Synthetic
VFTLEDFVGDWRQTAAYNLDQVLEQGGVSSLFQNLAVSVTPIQRIVLSGENALKIDIHVIIPYEGLSLDQMAQIEKIFKVVYPVDDHHFKVILHYGTLVIDGVTPNMIDYFGRPYEGIAVFDGKKITVTGTLWNGNKIIDERLINPDGSLLFRVTINV

SEQ ID NO: 1617 - DNA, 474 bp, Artificial Sequence
  Synthetic
gtcttcacactcgaagatttcgttggggactggcgacagacagccgcctacaacctggaccaagtccttgaacagggaggtgtgtccagtttgtttcagaatctcgccgtgtccgtaactccgatccaaaggattgtcctgagcggtgaaaatgccctgaagatcgacatccatgtcatcatcccgtatgaaggtctgagcatggaccaaatggcccagatcgaaaaaatttttaaggtggtgtaccctgtggatgatcatcactttaaggtgatcctgcactatggcacactggtaatcgacggggttacgccgaacatgatcgactatttcggacggccgtatgaaggcatcgccgtgttcgacggcaaaaagatcactgtaacagggaccctgtggaacggcaacaaaattatcgacgagcgcctgatcaaccccgacggctccctgctgttccgagtaaccatcaacgtt

SEQ ID NO: 1618 - protein, 158 aa, Artificial Sequence
  Synthetic
VFTLEDFVGDWRQTAAYNLDQVLEQGGVSSLFQNLAVSVTPIQRIVLSGENALKIDIHVIIPYEGLSMDQMAQIEKIFKVVYPVDDHHFKVILHYGTLVIDGVTPNMIDYFGRPYEGIAVFDGKKITVTGTLWNGNKIIDERLINPDGSLLFRVTINV

SEQ ID NO: 1619 - DNA, 474 bp, Artificial Sequence
  Synthetic
gtcttcacactcgaagatttcgttggggactggcgacagacagccgcctacaacctggaccaagtccttgaacagggaggtgtgtccagtttgtttcagaatctcgccgtgtccgtaactccgatccaaaggattgtcctgagcggtgaaaatgccctgaagatcgacatccatgtcatcatcccgtatgaaggtctgagcaacgaccaaatggcccagatcgaaaaaatttttaaggtggtgtaccctgtggatgatcatcactttaaggtgatcctgcactatggcacactggtaatcgacggggttacgccgaacatgatcgactatttcggacggccgtatgaaggcatcgccgtgttcgacggcaaaaagatcactgtaacagggaccctgtggaacggcaacaaaattatcgacgagcgcctgatcaaccccgacggctccctgctgttccgagtaaccatcaacgtt

SEQ ID NO: 1620 - protein, 158 aa, Artificial Sequence
  Synthetic
VFTLEDFVGDWRQTAAYNLDQVLEQGGVSSLFQNLAVSVTPIQRIVLSGENALKIDIHVIIPYEGLSNDQMAQIEKIFKVVYPVDDHHFKVILHYGTLVIDGVTPNMIDYFGRPYEGIAVFDGKKITVTGTLWNGNKIIDERLINPDGSLLFRVTINV

SEQ ID NO: 1621 - DNA, 474 bp, Artificial Sequence
  Synthetic
gtcttcacactcgaagatttcgttggggactggcgacagacagccgcctacaacctggaccaagtccttgaacagggaggtgtgtccagtttgtttcagaatctcgccgtgtccgtaactccgatccaaaggattgtcctgagcggtgaaaatgccctgaagatcgacatccatgtcatcatcccgtatgaaggtctgagccccgaccaaatggcccagatcgaaaaaatttttaaggtggtgtaccctgtggatgatcatcactttaaggtgatcctgcactatggcacactggtaatcgacggggttacgccgaacatgatcgactatttcggacggccgtatgaaggcatcgccgtgttcgacggcaaaaagatcactgtaacagggaccctgtggaacggcaacaaaattatcgacgagcgcctgatcaaccccgacggctccctgctgttccgagtaaccatcaacgtt

SEQ ID NO: 1622 - protein, 158 aa, Artificial Sequence
  Synthetic
VFTLEDFVGDWRQTAAYNLDQVLEQGGVSSLFQNLAVSVTPIQRIVLSGENALKIDIHVIIPYEGLSPDQMAQIEKIFKVVYPVDDHHFKVILHYGTLVIDGVTPNMIDYFGRPYEGIAVFDGKKITVTGTLWNGNKIIDERLINPDGSLLFRVTINV

SEQ ID NO: 1623 - DNA, 474 bp, Artificial Sequence
  Synthetic
gtcttcacactcgaagatttcgttggggactggcgacagacagccgcctacaacctggaccaagtccttgaacagggaggtgtgtccagtttgtttcagaatctcgccgtgtccgtaactccgatccaaaggattgtcctgagcggtgaaaatgccctgaagatcgacatccatgtcatcatcccgtatgaaggtctgagccaggaccaaatggcccagatcgaaaaaatttttaaggtggtgtaccctgtggatgatcatcactttaaggtgatcctgcactatggcacactggtaatcgacggggttacgccgaacatgatcgactatttcggacggccgtatgaaggcatcgccgtgttcgacggcaaaaagatcactgtaacagggaccctgtggaacggcaacaaaattatcgacgagcgcctgatcaaccccgacggctccctgctgttccgagtaaccatcaacgtt

SEQ ID NO: 1624 - protein, 158 aa, Artificial Sequence
  Synthetic
VFTLEDFVGDWRQTAAYNLDQVLEQGGVSSLFQNLAVSVTPIQRIVLSGENALKIDIHVIIPYEGLSQDQMAQIEKIFKVVYPVDDHHFKVILHYGTLVIDGVTPNMIDYFGRPYEGIAVFDGKKITVTGTLWNGNKIIDERLINPDGSLLFRVTINV

SEQ ID NO: 1625 - DNA, 474 bp, Artificial Sequence
  Synthetic
gtcttcacactcgaagatttcgttggggactggcgacagacagccgcctacaacctggaccaagtccttgaacagggaggtgtgtccagtttgtttcagaatctcgccgtgtccgtaactccgatccaaaggattgtcctgagcggtgaaaatgccctgaagatcgacatccatgtcatcatcccgtatgaaggtctgagccgggaccaaatggcccagatcgaaaaaatttttaaggtggtgtaccctgtggatgatcatcactttaaggtgatcctgcactatggcacactggtaatcgacggggttacgccgaacatgatcgactatttcggacggccgtatgaaggcatcgccgtgttcgacggcaaaaagatcactgtaacagggaccctgtggaacggcaacaaaattatcgacgagcgcctgatcaaccccgacggctccctgctgttccgagtaaccatcaacgtt

SEQ ID NO: 1626 - protein, 158 aa, Artificial Sequence
  Synthetic
VFTLEDFVGDWRQTAAYNLDQVLEQGGVSSLFQNLAVSVTPIQRIVLSGENALKIDIHVIIPYEGLSRDQMAQIEKIFKVVYPVDDHHFKVILHYGTLVIDGVTPNMIDYFGRPYEGIAVFDGKKITVTGTLWNGNKIIDERLINPDGSLLFRVTINV

SEQ ID NO: 1627 - DNA, 474 bp, Artificial Sequence
  Synthetic
gtcttcacactcgaagatttcgttggggactggcgacagacagccgcctacaacctggaccaagtccttgaacagggaggtgtgtccagtttgtttcagaatctcgccgtgtccgtaactccgatccaaaggattgtcctgagcggtgaaaatgccctgaagatcgacatccatgtcatcatcccgtatgaaggtctgagcagcgaccaaatggcccagatcgaaaaaatttttaaggtggtgtaccctgtggatgatcatcactttaaggtgatcctgcactatggcacactggtaatcgacggggttacgccgaacatgatcgactatttcggacggccgtatgaaggcatcgccgtgttcgacggcaaaaagatcactgtaacagggaccctgtggaacggcaacaaaattatcgacgagcgcctgatcaaccccgacggctccctgctgttccgagtaaccatcaacgtt

SEQ ID NO: 1628 - protein, 158 aa, Artificial Sequence
  Synthetic
VFTLEDFVGDWRQTAAYNLDQVLEQGGVSSLFQNLAVSVTPIQRIVLSGENALKIDIHVIIPYEGLSSDQMAQIEKIFKVVYPVDDHHFKVILHYGTLVIDGVTPNMIDYFGRPYEGIAVFDGKKITVTGTLWNGNKIIDERLINPDGSLLFRVTINV

SEQ ID NO: 1629 - DNA, 474 bp, Artificial Sequence
  Synthetic
gtcttcacactcgaagatttcgttggggactggcgacagacagccgcctacaacctggaccaagtccttgaacagggaggtgtgtccagtttgtttcagaatctcgccgtgtccgtaactccgatccaaaggattgtcctgagcggtgaaaatgccctgaagatcgacatccatgtcatcatcccgtatgaaggtctgagcaccgaccaaatggcccagatcgaaaaaatttttaaggtggtgtaccctgtggatgatcatcactttaaggtgatcctgcactatggcacactggtaatcgacggggttacgccgaacatgatcgactatttcggacggccgtatgaaggcatcgccgtgttcgacggcaaaaagatcactgtaacagggaccctgtggaacggcaacaaaattatcgacgagcgcctgatcaaccccgacggctccctgctgttccgagtaaccatcaacgtt

SEQ ID NO: 1630 - protein, 158 aa, Artificial Sequence
  Synthetic
VFTLEDFVGDWRQTAAYNLDQVLEQGGVSSLFQNLAVSVTPIQRIVLSGENALKIDIHVIIPYEGLSTDQMAQIEKIFKVVYPVDDHHFKVILHYGTLVIDGVTPNMIDYFGRPYEGIAVFDGKKITVTGTLWNGNKIIDERLINPDGSLLFRVTINV

SEQ ID NO: 1631 - DNA, 474 bp, Artificial Sequence
  Synthetic
gtcttcacactcgaagatttcgttggggactggcgacagacagccgcctacaacctggaccaagtccttgaacagggaggtgtgtccagtttgtttcagaatctcgccgtgtccgtaactccgatccaaaggattgtcctgagcggtgaaaatgccctgaagatcgacatccatgtcatcatcccgtatgaaggtctgagcgtggaccaaatggcccagatcgaaaaaatttttaaggtggtgtaccctgtggatgatcatcactttaaggtgatcctgcactatggcacactggtaatcgacggggttacgccgaacatgatcgactatttcggacggccgtatgaaggcatcgccgtgttcgacggcaaaaagatcactgtaacagggaccctgtggaacggcaacaaaattatcgacgagcgcctgatcaaccccgacggctccctgctgttccgagtaaccatcaacgtt

SEQ ID NO: 1632 - protein, 158 aa, Artificial Sequence
  Synthetic
VFTLEDFVGDWRQTAAYNLDQVLEQGGVSSLFQNLAVSVTPIQRIVLSGENALKIDIHVIIPYEGLSVDQMAQIEKIFKVVYPVDDHHFKVILHYGTLVIDGVTPNMIDYFGRPYEGIAVFDGKKITVTGTLWNGNKIIDERLINPDGSLLFRVTINV

SEQ ID NO: 1633 - DNA, 474 bp, Artificial Sequence
  Synthetic
gtcttcacactcgaagatttcgttggggactggcgacagacagccgcctacaacctggaccaagtccttgaacagggaggtgtgtccagtttgtttcagaatctcgccgtgtccgtaactccgatccaaaggattgtcctgagcggtgaaaatgccctgaagatcgacatccatgtcatcatcccgtatgaaggtctgagctgggaccaaatggcccagatcgaaaaaatttttaaggtggtgtaccctgtggatgatcatcactttaaggtgatcctgcactatggcacactggtaatcgacggggttacgccgaacatgatcgactatttcggacggccgtatgaaggcatcgccgtgttcgacggcaaaaagatcactgtaacagggaccctgtggaacggcaacaaaattatcgacgagcgcctgatcaaccccgacggctccctgctgttccgagtaaccatcaacgtt

SEQ ID NO: 1634 - protein, 158 aa, Artificial Sequence
  Synthetic
VFTLEDFVGDWRQTAAYNLDQVLEQGGVSSLFQNLAVSVTPIQRIVLSGENALKIDIHVIIPYEGLSWDQMAQIEKIFKVVYPVDDHHFKVILHYGTLVIDGVTPNMIDYFGRPYEGIAVFDGKKITVTGTLWNGNKIIDERLINPDGSLLFRVTINV

SEQ ID NO: 1635 - DNA, 474 bp, Artificial Sequence
  Synthetic
gtcttcacactcgaagatttcgttggggactggcgacagacagccgcctacaacctggaccaagtccttgaacagggaggtgtgtccagtttgtttcagaatctcgccgtgtccgtaactccgatccaaaggattgtcctgagcggtgaaaatgccctgaagatcgacatccatgtcatcatcccgtatgaaggtctgagctacgaccaaatggcccagatcgaaaaaatttttaaggtggtgtaccctgtggatgatcatcactttaaggtgatcctgcactatggcacactggtaatcgacggggttacgccgaacatgatcgactatttcggacggccgtatgaaggcatcgccgtgttcgacggcaaaaagatcactgtaacagggaccctgtggaacggcaacaaaattatcgacgagcgcctgatcaaccccgacggctccctgctgttccgagtaaccatcaacgtt

SEQ ID NO: 1636 - protein, 158 aa, Artificial Sequence
  Synthetic
VFTLEDFVGDWRQTAAYNLDQVLEQGGVSSLFQNLAVSVTPIQRIVLSGENALKIDIHVIIPYEGLSYDQMAQIEKIFKVVYPVDDHHFKVILHYGTLVIDGVTPNMIDYFGRPYEGIAVFDGKKITVTGTLWNGNKIIDERLINPDGSLLFRVTINV

SEQ ID NO: 1637 - DNA, 474 bp, Artificial Sequence
  Synthetic
gtcttcacactcgaagatttcgttggggactggcgacagacagccgcctacaacctggaccaagtccttgaacagggaggtgtgtccagtttgtttcagaatctcgccgtgtccgtaactccgatccaaaggattgtcctgagcggtgaaaatgccctgaagatcgacatccatgtcatcatcccgtatgaaggtctgagcgccgaccaaatggcccagatcgaaaaaatttttaaggtggtgtaccctgtggatgatcatcactttaaggtgatcctgcactatggcacactggtaatcgacggggttacgccgaacgccatcgactatttcggacggccgtatgaaggcatcgccgtgttcgacggcaaaaagatcactgtaacagggaccctgtggaacggcaacaaaattatcgacgagcgcctgatcaaccccgacggctccctgctgttccgagtaaccatcaacgtt

SEQ ID NO: 1638 - protein, 158 aa, Artificial Sequence
  Synthetic
VFTLEDFVGDWRQTAAYNLDQVLEQGGVSSLFQNLAVSVTPIQRIVLSGENALKIDIHVIIPYEGLSADQMAQIEKIFKVVYPVDDHHFKVILHYGTLVIDGVTPNAIDYFGRPYEGIAVFDGKKITVTGTLWNGNKIIDERLINPDGSLLFRVTINV

SEQ ID NO: 1639 - DNA, 474 bp, Artificial Sequence
  Synthetic
gtcttcacactcgaagatttcgttggggactggcgacagacagccgcctacaacctggaccaagtccttgaacagggaggtgtgtccagtttgtttcagaatctcgccgtgtccgtaactccgatccaaaggattgtcctgagcggtgaaaatgccctgaagatcgacatccatgtcatcatcccgtatgaaggtctgagcgccgaccaaatggcccagatcgaaaaaatttttaaggtggtgtaccctgtggatgatcatcactttaaggtgatcctgcactatggcacactggtaatcgacggggttacgccgaactgcatcgactatttcggacggccgtatgaaggcatcgccgtgttcgacggcaaaaagatcactgtaacagggaccctgtggaacggcaacaaaattatcgacgagcgcctgatcaaccccgacggctccctgctgttccgagtaaccatcaacgtt

SEQ ID NO: 1640 - protein, 158 aa, Artificial Sequence
  Synthetic
VFTLEDFVGDWRQTAAYNLDQVLEQGGVSSLFQNLAVSVTPIQRIVLSGENALKIDIHVIIPYEGLSADQMAQIEKIFKVVYPVDDHHFKVILHYGTLVIDGVTPNCIDYFGRPYEGIAVFDGKKITVTGTLWNGNKIIDERLINPDGSLLFRVTINV

SEQ ID NO: 1641 - DNA, 474 bp, Artificial Sequence
  Synthetic
gtcttcacactcgaagatttcgttggggactggcgacagacagccgcctacaacctggaccaagtccttgaacagggaggtgtgtccagtttgtttcagaatctcgccgtgtccgtaactccgatccaaaggattgtcctgagcggtgaaaatgccctgaagatcgacatccatgtcatcatcccgtatgaaggtctgagcgccgaccaaatggcccagatcgaaaaaatttttaaggtggtgtaccctgtggatgatcatcactttaaggtgatcctgcactatggcacactggtaatcgacggggttacgccgaacgacatcgactatttcggacggccgtatgaaggcatcgccgtgttcgacggcaaaaagatcactgtaacagggaccctgtggaacggcaacaaaattatcgacgagcgcctgatcaaccccgacggctccctgctgttccgagtaaccatcaacgtt

SEQ ID NO: 1642 - protein, 158 aa, Artificial Sequence
  Synthetic
VFTLEDFVGDWRQTAAYNLDQVLEQGGVSSLFQNLAVSVTPIQRIVLSGENALKIDIHVIIPYEGLSADQMAQIEKIFKVVYPVDDHHFKVILHYGTLVIDGVTPNDIDYFGRPYEGIAVFDGKKITVTGTLWNGNKIIDERLINPDGSLLFRVTINV

SEQ ID NO: 1643 - DNA, 474 bp, Artificial Sequence
  Synthetic
gtcttcacactcgaagatttcgttggggactggcgacagacagccgcctacaacctggaccaagtccttgaacagggaggtgtgtccagtttgtttcagaatctcgccgtgtccgtaactccgatccaaaggattgtcctgagcggtgaaaatgccctgaagatcgacatccatgtcatcatcccgtatgaaggtctgagcgccgaccaaatggcccagatcgaaaaaatttttaaggtggtgtaccctgtggatgatcatcactttaaggtgatcctgcactatggcacactggtaatcgacggggttacgccgaacgagatcgactatttcggacggccgtatgaaggcatcgccgtgttcgacggcaaaaagatcactgtaacagggaccctgtggaacggcaacaaaattatcgacgagcgcctgatcaaccccgacggctccctgctgttccgagtaaccatcaacgtt

SEQ ID NO: 1644 - protein, 158 aa, Artificial Sequence
  Synthetic
VFTLEDFVGDWRQTAAYNLDQVLEQGGVSSLFQNLAVSVTPIQRIVLSGENALKIDIHVIIPYEGLSADQMAQIEKIFKVVYPVDDHHFKVILHYGTLVIDGVTPNEIDYFGRPYEGIAVFDGKKITVTGTLWNGNKIIDERLINPDGSLLFRVTINV

SEQ ID NO: 1645 - DNA, 474 bp, Artificial Sequence
  Synthetic
gtcttcacactcgaagatttcgttggggactggcgacagacagccgcctacaacctggaccaagtccttgaacagggaggtgtgtccagtttgtttcagaatctcgccgtgtccgtaactccgatccaaaggattgtcctgagcggtgaaaatgccctgaagatcgacatccatgtcatcatcccgtatgaaggtctgagcgccgaccaaatggcccagatcgaaaaaatttttaaggtggtgtaccctgtggatgatcatcactttaaggtgatcctgcactatggcacactggtaatcgacggggttacgccgaacttcatcgactatttcggacggccgtatgaaggcatcgccgtgttcgacggcaaaaagatcactgtaacagggaccctgtggaacggcaacaaaattatcgacgagcgcctgatcaaccccgacggctccctgctgttccgagtaaccatcaacgtt

SEQ ID NO: 1646 - protein, 158 aa, Artificial Sequence
  Synthetic
VFTLEDFVGDWRQTAAYNLDQVLEQGGVSSLFQNLAVSVTPIQRIVLSGENALKIDIHVIIPYEGLSADQMAQIEKIFKVVYPVDDHHFKVILHYGTLVIDGVTPNFIDYFGRPYEGIAVFDGKKITVTGTLWNGNKIIDERLINPDGSLLFRVTINV

SEQ ID NO: 1647 - DNA, 474 bp, Artificial Sequence
  Synthetic
gtcttcacactcgaagatttcgttggggactggcgacagacagccgcctacaacctggaccaagtccttgaacagggaggtgtgtccagtttgtttcagaatctcgccgtgtccgtaactccgatccaaaggattgtcctgagcggtgaaaatgccctgaagatcgacatccatgtcatcatcccgtatgaaggtctgagcgccgaccaaatggcccagatcgaaaaaatttttaaggtggtgtaccctgtggatgatcatcactttaaggtgatcctgcactatggcacactggtaatcgacggggttacgccgaacggcatcgactatttcggacggccgtatgaaggcatcgccgtgttcgacggcaaaaagatcactgtaacagggaccctgtggaacggcaacaaaattatcgacgagcgcctgatcaaccccgacggctccctgctgttccgagtaaccatcaacgtt

SEQ ID NO: 1648 - protein, 158 aa, Artificial Sequence
  Synthetic
VFTLEDFVGDWRQTAAYNLDQVLEQGGVSSLFQNLAVSVTPIQRIVLSGENALKIDIHVIIPYEGLSADQMAQIEKIFKVVYPVDDHHFKVILHYGTLVIDGVTPNGIDYFGRPYEGIAVFDGKKITVTGTLWNGNKIIDERLINPDGSLLFRVTINV

SEQ ID NO: 1649 - DNA, 474 bp, Artificial Sequence
  Synthetic
gtcttcacactcgaagatttcgttggggactggcgacagacagccgcctacaacctggaccaagtccttgaacagggaggtgtgtccagtttgtttcagaatctcgccgtgtccgtaactccgatccaaaggattgtcctgagcggtgaaaatgccctgaagatcgacatccatgtcatcatcccgtatgaaggtctgagcgccgaccaaatggcccagatcgaaaaaatttttaaggtggtgtaccctgtggatgatcatcactttaaggtgatcctgcactatggcacactggtaatcgacggggttacgccgaaccacatcgactatttcggacggccgtatgaaggcatcgccgtgttcgacggcaaaaagatcactgtaacagggaccctgtggaacggcaacaaaattatcgacgagcgcctgatcaaccccgacggctccctgctgttccgagtaaccatcaacgtt

SEQ ID NO: 1650 - protein, 158 aa, Artificial Sequence
  Synthetic
VFTLEDFVGDWRQTAAYNLDQVLEQGGVSSLFQNLAVSVTPIQRIVLSGENALKIDIHVIIPYEGLSADQMAQIEKIFKVVYPVDDHHFKVILHYGTLVIDGVTPNHIDYFGRPYEGIAVFDGKKITVTGTLWNGNKIIDERLINPDGSLLFRVTINV

SEQ ID NO: 1651 - DNA, 474 bp, Artificial Sequence
  Synthetic
gtcttcacactcgaagatttcgttggggactggcgacagacagccgcctacaacctggaccaagtccttgaacagggaggtgtgtccagtttgtttcagaatctcgccgtgtccgtaactccgatccaaaggattgtcctgagcggtgaaaatgccctgaagatcgacatccatgtcatcatcccgtatgaaggtctgagcgccgaccaaatggcccagatcgaaaaaatttttaaggtggtgtaccctgtggatgatcatcactttaaggtgatcctgcactatggcacactggtaatcgacggggttacgccgaacatcatcgactatttcggacggccgtatgaaggcatcgccgtgttcgacggcaaaaagatcactgtaacagggaccctgtggaacggcaacaaaattatcgacgagcgcctgatcaaccccgacggctccctgctgttccgagtaaccatcaacgtt

SEQ ID NO: 1652 - protein, 158 aa, Artificial Sequence
  Synthetic
VFTLEDFVGDWRQTAAYNLDQVLEQGGVSSLFQNLAVSVTPIQRIVLSGENALKIDIHVIIPYEGLSADQMAQIEKIFKVVYPVDDHHFKVILHYGTLVIDGVTPNIIDYFGRPYEGIAVFDGKKITVTGTLWNGNKIIDERLINPDGSLLFRVTINV

SEQ ID NO: 1653 - DNA, 474 bp, Artificial Sequence
  Synthetic
gtcttcacactcgaagatttcgttggggactggcgacagacagccgcctacaacctggaccaagtccttgaacagggaggtgtgtccagtttgtttcagaatctcgccgtgtccgtaactccgatccaaaggattgtcctgagcggtgaaaatgccctgaagatcgacatccatgtcatcatcccgtatgaaggtctgagcgccgaccaaatggcccagatcgaaaaaatttttaaggtggtgtaccctgtggatgatcatcactttaaggtgatcctgcactatggcacactggtaatcgacggggttacgccgaacaagatcgactatttcggacggccgtatgaaggcatcgccgtgttcgacggcaaaaagatcactgtaacagggaccctgtggaacggcaacaaaattatcgacgagcgcctgatcaaccccgacggctccctgctgttccgagtaaccatcaacgtt

SEQ ID NO: 1654 - protein, 158 aa, Artificial Sequence
  Synthetic
VFTLEDFVGDWRQTAAYNLDQVLEQGGVSSLFQNLAVSVTPIQRIVLSGENALKIDIHVIIPYEGLSADQMAQIEKIFKVVYPVDDHHFKVILHYGTLVIDGVTPNKIDYFGRPYEGIAVFDGKKITVTGTLWNGNKIIDERLINPDGSLLFRVTINV

SEQ ID NO: 1655 - DNA, 474 bp, Artificial Sequence
  Synthetic
gtcttcacactcgaagatttcgttggggactggcgacagacagccgcctacaacctggaccaagtccttgaacagggaggtgtgtccagtttgtttcagaatctcgccgtgtccgtaactccgatccaaaggattgtcctgagcggtgaaaatgccctgaagatcgacatccatgtcatcatcccgtatgaaggtctgagcgccgaccaaatggcccagatcgaaaaaatttttaaggtggtgtaccctgtggatgatcatcactttaaggtgatcctgcactatggcacactggtaatcgacggggttacgccgaacctgatcgactatttcggacggccgtatgaaggcatcgccgtgttcgacggcaaaaagatcactgtaacagggaccctgtggaacggcaacaaaattatcgacgagcgcctgatcaaccccgacggctccctgctgttccgagtaaccatcaacgtt

SEQ ID NO: 1656 - protein, 158 aa, Artificial Sequence
  Synthetic
VFTLEDFVGDWRQTAAYNLDQVLEQGGVSSLFQNLAVSVTPIQRIVLSGENALKIDIHVIIPYEGLSADQMAQIEKIFKVVYPVDDHHFKVILHYGTLVIDGVTPNLIDYFGRPYEGIAVFDGKKITVTGTLWNGNKIIDERLINPDGSLLFRVTINV

SEQ ID NO: 1657 - DNA, 474 bp, Artificial Sequence
  Synthetic
gtcttcacactcgaagatttcgttggggactggcgacagacagccgcctacaacctggaccaagtccttgaacagggaggtgtgtccagtttgtttcagaatctcgccgtgtccgtaactccgatccaaaggattgtcctgagcggtgaaaatgccctgaagatcgacatccatgtcatcatcccgtatgaaggtctgagcgccgaccaaatggcccagatcgaaaaaatttttaaggtggtgtaccctgtggatgatcatcactttaaggtgatcctgcactatggcacactggtaatcgacggggttacgccgaacaacatcgactatttcggacggccgtatgaaggcatcgccgtgttcgacggcaaaaagatcactgtaacagggaccctgtggaacggcaacaaaattatcgacgagcgcctgatcaaccccgacggctccctgctgttccgagtaaccatcaacgtt

SEQ ID NO: 1658 - protein, 158 aa, Artificial Sequence
  Synthetic
VFTLEDFVGDWRQTAAYNLDQVLEQGGVSSLFQNLAVSVTPIQRIVLSGENALKIDIHVIIPYEGLSADQMAQIEKIFKVVYPVDDHHFKVILHYGTLVIDGVTPNNIDYFGRPYEGIAVFDGKKITVTGTLWNGNKIIDERLINPDGSLLFRVTINV

SEQ ID NO: 1659 - DNA, 474 bp, Artificial Sequence
  Synthetic
gtcttcacactcgaagatttcgttggggactggcgacagacagccgcctacaacctggaccaagtccttgaacagggaggtgtgtccagtttgtttcagaatctcgccgtgtccgtaactccgatccaaaggattgtcctgagcggtgaaaatgccctgaagatcgacatccatgtcatcatcccgtatgaaggtctgagcgccgaccaaatggcccagatcgaaaaaatttttaaggtggtgtaccctgtggatgatcatcactttaaggtgatcctgcactatggcacactggtaatcgacggggttacgccgaaccccatcgactatttcggacggccgtatgaaggcatcgccgtgttcgacggcaaaaagatcactgtaacagggaccctgtggaacggcaacaaaattatcgacgagcgcctgatcaaccccgacggctccctgctgttccgagtaaccatcaacgtt

SEQ ID NO: 1660 - protein, 158 aa, Artificial Sequence
  Synthetic
VFTLEDFVGDWRQTAAYNLDQVLEQGGVSSLFQNLAVSVTPIQRIVLSGENALKIDIHVIIPYEGLSADQMAQIEKIFKVVYPVDDHHFKVILHYGTLVIDGVTPNPIDYFGRPYEGIAVFDGKKITVTGTLWNGNKIIDERLINPDGSLLFRVTINV

SEQ ID NO: 1661 - DNA, 474 bp, Artificial Sequence
  Synthetic
gtcttcacactcgaagatttcgttggggactggcgacagacagccgcctacaacctggaccaagtccttgaacagggaggtgtgtccagtttgtttcagaatctcgccgtgtccgtaactccgatccaaaggattgtcctgagcggtgaaaatgccctgaagatcgacatccatgtcatcatcccgtatgaaggtctgagcgccgaccaaatggcccagatcgaaaaaatttttaaggtggtgtaccctgtggatgatcatcactttaaggtgatcctgcactatggcacactggtaatcgacggggttacgccgaaccagatcgactatttcggacggccgtatgaaggcatcgccgtgttcgacggcaaaaagatcactgtaacagggaccctgtggaacggcaacaaaattatcgacgagcgcctgatcaaccccgacggctccctgctgttccgagtaaccatcaacgtt

SEQ ID NO: 1662 - protein, 158 aa, Artificial Sequence
  Synthetic
VFTLEDFVGDWRQTAAYNLDQVLEQGGVSSLFQNLAVSVTPIQRIVLSGENALKIDIHVIIPYEGLSADQMAQIEKIFKVVYPVDDHHFKVILHYGTLVIDGVTPNQIDYFGRPYEGIAVFDGKKITVTGTLWNGNKIIDERLINPDGSLLFRVTINV

SEQ ID NO: 1663 - DNA, 474 bp, Artificial Sequence
  Synthetic
gtcttcacactcgaagatttcgttggggactggcgacagacagccgcctacaacctggaccaagtccttgaacagggaggtgtgtccagtttgtttcagaatctcgccgtgtccgtaactccgatccaaaggattgtcctgagcggtgaaaatgccctgaagatcgacatccatgtcatcatcccgtatgaaggtctgagcgccgaccaaatggcccagatcgaaaaaatttttaaggtggtgtaccctgtggatgatcatcactttaaggtgatcctgcactatggcacactggtaatcgacggggttacgccgaaccggatcgactatttcggacggccgtatgaaggcatcgccgtgttcgacggcaaaaagatcactgtaacagggaccctgtggaacggcaacaaaattatcgacgagcgcctgatcaaccccgacggctccctgctgttccgagtaaccatcaacgtt

SEQ ID NO: 1664 - protein, 158 aa, Artificial Sequence
  Synthetic
VFTLEDFVGDWRQTAAYNLDQVLEQGGVSSLFQNLAVSVTPIQRIVLSGENALKIDIHVIIPYEGLSADQMAQIEKIFKVVYPVDDHHFKVILHYGTLVIDGVTPNRIDYFGRPYEGIAVFDGKKITVTGTLWNGNKIIDERLINPDGSLLFRVTINV

SEQ ID NO: 1665 - DNA, 474 bp, Artificial Sequence
  Synthetic
gtcttcacactcgaagatttcgttggggactggcgacagacagccgcctacaacctggaccaagtccttgaacagggaggtgtgtccagtttgtttcagaatctcgccgtgtccgtaactccgatccaaaggattgtcctgagcggtgaaaatgccctgaagatcgacatccatgtcatcatcccgtatgaaggtctgagcgccgaccaaatggcccagatcgaaaaaatttttaaggtggtgtaccctgtggatgatcatcactttaaggtgatcctgcactatggcacactggtaatcgacggggttacgccgaacagcatcgactatttcggacggccgtatgaaggcatcgccgtgttcgacggcaaaaagatcactgtaacagggaccctgtggaacggcaacaaaattatcgacgagcgcctgatcaaccccgacggctccctgctgttccgagtaaccatcaacgtt

SEQ ID NO: 1666 - protein, 158 aa, Artificial Sequence
  Synthetic
VFTLEDFVGDWRQTAAYNLDQVLEQGGVSSLFQNLAVSVTPIQRIVLSGENALKIDIHVIIPYEGLSADQMAQIEKIFKVVYPVDDHHFKVILHYGTLVIDGVTPNSIDYFGRPYEGIAVFDGKKITVTGTLWNGNKIIDERLINPDGSLLFRVTINV

SEQ ID NO: 1667 - DNA, 474 bp, Artificial Sequence
  Synthetic
gtcttcacactcgaagatttcgttggggactggcgacagacagccgcctacaacctggaccaagtccttgaacagggaggtgtgtccagtttgtttcagaatctcgccgtgtccgtaactccgatccaaaggattgtcctgagcggtgaaaatgccctgaagatcgacatccatgtcatcatcccgtatgaaggtctgagcgccgaccaaatggcccagatcgaaaaaatttttaaggtggtgtaccctgtggatgatcatcactttaaggtgatcctgcactatggcacactggtaatcgacggggttacgccgaacaccatcgactatttcggacggccgtatgaaggcatcgccgtgttcgacggcaaaaagatcactgtaacagggaccctgtggaacggcaacaaaattatcgacgagcgcctgatcaaccccgacggctccctgctgttccgagtaaccatcaacgtt

SEQ ID NO: 1668 - protein, 158 aa, Artificial Sequence
  Synthetic
VFTLEDFVGDWRQTAAYNLDQVLEQGGVSSLFQNLAVSVTPIQRIVLSGENALKIDIHVIIPYEGLSADQMAQIEKIFKVVYPVDDHHFKVILHYGTLVIDGVTPNTIDYFGRPYEGIAVFDGKKITVTGTLWNGNKIIDERLINPDGSLLFRVTINV

SEQ ID NO: 1669 - DNA, 474 bp, Artificial Sequence
  Synthetic
gtcttcacactcgaagatttcgttggggactggcgacagacagccgcctacaacctggaccaagtccttgaacagggaggtgtgtccagtttgtttcagaatctcgccgtgtccgtaactccgatccaaaggattgtcctgagcggtgaaaatgccctgaagatcgacatccatgtcatcatcccgtatgaaggtctgagcgccgaccaaatggcccagatcgaaaaaatttttaaggtggtgtaccctgtggatgatcatcactttaaggtgatcctgcactatggcacactggtaatcgacggggttacgccgaacgtgatcgactatttcggacggccgtatgaaggcatcgccgtgttcgacggcaaaaagatcactgtaacagggaccctgtggaacggcaacaaaattatcgacgagcgcctgatcaaccccgacggctccctgctgttccgagtaaccatcaacgtt

SEQ ID NO: 1670 - protein, 158 aa, Artificial Sequence
  Synthetic
VFTLEDFVGDWRQTAAYNLDQVLEQGGVSSLFQNLAVSVTPIQRIVLSGENALKIDIHVIIPYEGLSADQMAQIEKIFKVVYPVDDHHFKVILHYGTLVIDGVTPNVIDYFGRPYEGIAVFDGKKITVTGTLWNGNKIIDERLINPDGSLLFRVTINV

SEQ ID NO: 1671 - DNA, 474 bp, Artificial Sequence
  Synthetic
gtcttcacactcgaagatttcgttggggactggcgacagacagccgcctacaacctggaccaagtccttgaacagggaggtgtgtccagtttgtttcagaatctcgccgtgtccgtaactccgatccaaaggattgtcctgagcggtgaaaatgccctgaagatcgacatccatgtcatcatcccgtatgaaggtctgagcgccgaccaaatggcccagatcgaaaaaatttttaaggtggtgtaccctgtggatgatcatcactttaaggtgatcctgcactatggcacactggtaatcgacggggttacgccgaactggatcgactatttcggacggccgtatgaaggcatcgccgtgttcgacggcaaaaagatcactgtaacagggaccctgtggaacggcaacaaaattatcgacgagcgcctgatcaaccccgacggctccctgctgttccgagtaaccatcaacgtt

SEQ ID NO: 1672 - protein, 158 aa, Artificial Sequence
  Synthetic
VFTLEDFVGDWRQTAAYNLDQVLEQGGVSSLFQNLAVSVTPIQRIVLSGENALKIDIHVIIPYEGLSADQMAQIEKIFKVVYPVDDHHFKVILHYGTLVIDGVTPNWIDYFGRPYEGIAVFDGKKITVTGTLWNGNKIIDERLINPDGSLLFRVTINV

SEQ ID NO: 1673 - DNA, 474 bp, Artificial Sequence
  Synthetic
gtcttcacactcgaagatttcgttggggactggcgacagacagccgcctacaacctggaccaagtccttgaacagggaggtgtgtccagtttgtttcagaatctcgccgtgtccgtaactccgatccaaaggattgtcctgagcggtgaaaatgccctgaagatcgacatccatgtcatcatcccgtatgaaggtctgagcgccgaccaaatggcccagatcgaaaaaatttttaaggtggtgtaccctgtggatgatcatcactttaaggtgatcctgcactatggcacactggtaatcgacggggttacgccgaactacatcgactatttcggacggccgtatgaaggcatcgccgtgttcgacggcaaaaagatcactgtaacagggaccctgtggaacggcaacaaaattatcgacgagcgcctgatcaaccccgacggctccctgctgttccgagtaaccatcaacgtt

SEQ ID NO: 1674 - protein, 158 aa, Artificial Sequence
  Synthetic
VFTLEDFVGDWRQTAAYNLDQVLEQGGVSSLFQNLAVSVTPIQRIVLSGENALKIDIHVIIPYEGLSADQMAQIEKIFKVVYPVDDHHFKVILHYGTLVIDGVTPNYIDYFGRPYEGIAVFDGKKITVTGTLWNGNKIIDERLINPDGSLLFRVTINV

SEQ ID NO: 1675 - DNA, 474 bp, Artificial Sequence
  Synthetic
gtcttcacactcgaagatttcgttggggactggcgacagacagccgcctacaacctggaccaagtccttgaacagggaggtgtgtccagtttgtttcagaatctcgccgtgtccgtaactccgatccaaaggattgtcctgagcggtgaaaatgccctgaagatcgacatccatgtcatcatcccgtatgaaggtctgagcgccgaccaaatggcccagatcgaaaaaatttttaaggtggtgtaccctgtggatgatcatcactttaaggtgatcctgcactatggcacactggtaatcgacggggttacgccgaacatgatcgactatttcggacggccgtatgaaggcatcgccgtgttcgacggcaaaaagatcactgtaacagggaccctgtggaacggcaacaaaattatcgacgagcgcctgatcaaccccgacggctccgccctgttccgagtaaccatcaacgtt

SEQ ID NO: 1676 - protein, 158 aa, Artificial Sequence
  Synthetic
VFTLEDFVGDWRQTAAYNLDQVLEQGGVSSLFQNLAVSVTPIQRIVLSGENALKIDIHVIIPYEGLSADQMAQIEKIFKVVYPVDDHHFKVILHYGTLVIDGVTPNMIDYFGRPYEGIAVFDGKKITVTGTLWNGNKIIDERLINPDGSALFRVTINV

SEQ ID NO: 1677 - DNA, 474 bp, Artificial Sequence
  Synthetic
gtcttcacactcgaagatttcgttggggactggcgacagacagccgcctacaacctggaccaagtccttgaacagggaggtgtgtccagtttgtttcagaatctcgccgtgtccgtaactccgatccaaaggattgtcctgagcggtgaaaatgccctgaagatcgacatccatgtcatcatcccgtatgaaggtctgagcgccgaccaaatggcccagatcgaaaaaatttttaaggtggtgtaccctgtggatgatcatcactttaaggtgatcctgcactatggcacactggtaatcgacggggttacgccgaacatgatcgactatttcggacggccgtatgaaggcatcgccgtgttcgacggcaaaaagatcactgtaacagggaccctgtggaacggcaacaaaattatcgacgagcgcctgatcaaccccgacggctcctgcctgttccgagtaaccatcaacgtt

SEQ ID NO: 1678 - protein, 158 aa, Artificial Sequence
  Synthetic
VFTLEDFVGDWRQTAAYNLDQVLEQGGVSSLFQNLAVSVTPIQRIVLSGENALKIDIHVIIPYEGLSADQMAQIEKIFKVVYPVDDHHFKVILHYGTLVIDGVTPNMIDYFGRPYEGIAVFDGKKITVTGTLWNGNKIIDERLINPDGSCLFRVTINV

SEQ ID NO: 1679 - DNA, 474 bp, Artificial Sequence
  Synthetic
gtcttcacactcgaagatttcgttggggactggcgacagacagccgcctacaacctggaccaagtccttgaacagggaggtgtgtccagtttgtttcagaatctcgccgtgtccgtaactccgatccaaaggattgtcctgagcggtgaaaatgccctgaagatcgacatccatgtcatcatcccgtatgaaggtctgagcgccgaccaaatggcccagatcgaaaaaatttttaaggtggtgtaccctgtggatgatcatcactttaaggtgatcctgcactatggcacactggtaatcgacggggttacgccgaacatgatcgactatttcggacggccgtatgaaggcatcgccgtgttcgacggcaaaaagatcactgtaacagggaccctgtggaacggcaacaaaattatcgacgagcgcctgatcaaccccgacggctccgacctgttccgagtaaccatcaacgtt

SEQ ID NO: 1680 - protein, 158 aa, Artificial Sequence
  Synthetic
VFTLEDFVGDWRQTAAYNLDQVLEQGGVSSLFQNLAVSVTPIQRIVLSGENALKIDIHVIIPYEGLSADQMAQIEKIFKVVYPVDDHHFKVILHYGTLVIDGVTPNMIDYFGRPYEGIAVFDGKKITVTGTLWNGNKIIDERLINPDGSDLFRVTINV

SEQ ID NO: 1681 - DNA, 474 bp, Artificial Sequence
  Synthetic
gtcttcacactcgaagatttcgttggggactggcgacagacagccgcctacaacctggaccaagtccttgaacagggaggtgtgtccagtttgtttcagaatctcgccgtgtccgtaactccgatccaaaggattgtcctgagcggtgaaaatgccctgaagatcgacatccatgtcatcatcccgtatgaaggtctgagcgccgaccaaatggcccagatcgaaaaaatttttaaggtggtgtaccctgtggatgatcatcactttaaggtgatcctgcactatggcacactggtaatcgacggggttacgccgaacatgatcgactatttcggacggccgtatgaaggcatcgccgtgttcgacggcaaaaagatcactgtaacagggaccctgtggaacggcaacaaaattatcgacgagcgcctgatcaaccccgacggctccgagctgttccgagtaaccatcaacgtt

SEQ ID NO: 1682 - protein, 158 aa, Artificial Sequence
  Synthetic
VFTLEDFVGDWRQTAAYNLDQVLEQGGVSSLFQNLAVSVTPIQRIVLSGENALKIDIHVIIPYEGLSADQMAQIEKIFKVVYPVDDHHFKVILHYGTLVIDGVTPNMIDYFGRPYEGIAVFDGKKITVTGTLWNGNKIIDERLINPDGSELFRVTINV

SEQ ID NO: 1683 - DNA, 474 bp, Artificial Sequence
  Synthetic
gtcttcacactcgaagatttcgttggggactggcgacagacagccgcctacaacctggaccaagtccttgaacagggaggtgtgtccagtttgtttcagaatctcgccgtgtccgtaactccgatccaaaggattgtcctgagcggtgaaaatgccctgaagatcgacatccatgtcatcatcccgtatgaaggtctgagcgccgaccaaatggcccagatcgaaaaaatttttaaggtggtgtaccctgtggatgatcatcactttaaggtgatcctgcactatggcacactggtaatcgacggggttacgccgaacatgatcgactatttcggacggccgtatgaaggcatcgccgtgttcgacggcaaaaagatcactgtaacagggaccctgtggaacggcaacaaaattatcgacgagcgcctgatcaaccccgacggctccttcctgttccgagtaaccatcaacgtt

SEQ ID NO: 1684 - protein, 158 aa, Artificial Sequence
  Synthetic
VFTLEDFVGDWRQTAAYNLDQVLEQGGVSSLFQNLAVSVTPIQRIVLSGENALKIDIHVIIPYEGLSADQMAQIEKIFKVVYPVDDHHFKVILHYGTLVIDGVTPNMIDYFGRPYEGIAVFDGKKITVTGTLWNGNKIIDERLINPDGSFLFRVTINV

SEQ ID NO: 1685 - DNA, 474 bp, Artificial Sequence
  Synthetic
gtcttcacactcgaagatttcgttggggactggcgacagacagccgcctacaacctggaccaagtccttgaacagggaggtgtgtccagtttgtttcagaatctcgccgtgtccgtaactccgatccaaaggattgtcctgagcggtgaaaatgccctgaagatcgacatccatgtcatcatcccgtatgaaggtctgagcgccgaccaaatggcccagatcgaaaaaatttttaaggtggtgtaccctgtggatgatcatcactttaaggtgatcctgcactatggcacactggtaatcgacggggttacgccgaacatgatcgactatttcggacggccgtatgaaggcatcgccgtgttcgacggcaaaaagatcactgtaacagggaccctgtggaacggcaacaaaattatcgacgagcgcctgatcaaccccgacggctccggcctgttccgagtaaccatcaacgtt

SEQ ID NO: 1686 - protein, 158 aa, Artificial Sequence
  Synthetic
VFTLEDFVGDWRQTAAYNLDQVLEQGGVSSLFQNLAVSVTPIQRIVLSGENALKIDIHVIIPYEGLSADQMAQIEKIFKVVYPVDDHHFKVILHYGTLVIDGVTPNMIDYFGRPYEGIAVFDGKKITVTGTLWNGNKIIDERLINPDGSGLFRVTINV

SEQ ID NO: 1687 - DNA, 474 bp, Artificial Sequence
  Synthetic
gtcttcacactcgaagatttcgttggggactggcgacagacagccgcctacaacctggaccaagtccttgaacagggaggtgtgtccagtttgtttcagaatctcgccgtgtccgtaactccgatccaaaggattgtcctgagcggtgaaaatgccctgaagatcgacatccatgtcatcatcccgtatgaaggtctgagcgccgaccaaatggcccagatcgaaaaaatttttaaggtggtgtaccctgtggatgatcatcactttaaggtgatcctgcactatggcacactggtaatcgacggggttacgccgaacatgatcgactatttcggacggccgtatgaaggcatcgccgtgttcgacggcaaaaagatcactgtaacagggaccctgtggaacggcaacaaaattatcgacgagcgcctgatcaaccccgacggctcccacctgttccgagtaaccatcaacgtt

SEQ ID NO: 1688 - protein, 158 aa, Artificial Sequence
  Synthetic
VFTLEDFVGDWRQTAAYNLDQVLEQGGVSSLFQNLAVSVTPIQRIVLSGENALKIDIHVIIPYEGLSADQMAQIEKIFKVVYPVDDHHFKVILHYGTLVIDGVTPNMIDYFGRPYEGIAVFDGKKITVTGTLWNGNKIIDERLINPDGSHLFRVTINV

SEQ ID NO: 1689 - DNA, 474 bp, Artificial Sequence
  Synthetic
gtcttcacactcgaagatttcgttggggactggcgacagacagccgcctacaacctggaccaagtccttgaacagggaggtgtgtccagtttgtttcagaatctcgccgtgtccgtaactccgatccaaaggattgtcctgagcggtgaaaatgccctgaagatcgacatccatgtcatcatcccgtatgaaggtctgagcgccgaccaaatggcccagatcgaaaaaatttttaaggtggtgtaccctgtggatgatcatcactttaaggtgatcctgcactatggcacactggtaatcgacggggttacgccgaacatgatcgactatttcggacggccgtatgaaggcatcgccgtgttcgacggcaaaaagatcactgtaacagggaccctgtggaacggcaacaaaattatcgacgagcgcctgatcaaccccgacggctccatcctgttccgagtaaccatcaacgtt

SEQ ID NO: 1690 - protein, 158 aa, Artificial Sequence
  Synthetic
VFTLEDFVGDWRQTAAYNLDQVLEQGGVSSLFQNLAVSVTPIQRIVLSGENALKIDIHVIIPYEGLSADQMAQIEKIFKVVYPVDDHHFKVILHYGTLVIDGVTPNMIDYFGRPYEGIAVFDGKKITVTGTLWNGNKIIDERLINPDGSILFRVTINV

SEQ ID NO: 1691 - DNA, 474 bp, Artificial Sequence
  Synthetic
gtcttcacactcgaagatttcgttggggactggcgacagacagccgcctacaacctggaccaagtccttgaacagggaggtgtgtccagtttgtttcagaatctcgccgtgtccgtaactccgatccaaaggattgtcctgagcggtgaaaatgccctgaagatcgacatccatgtcatcatcccgtatgaaggtctgagcgccgaccaaatggcccagatcgaaaaaatttttaaggtggtgtaccctgtggatgatcatcactttaaggtgatcctgcactatggcacactggtaatcgacggggttacgccgaacatgatcgactatttcggacggccgtatgaaggcatcgccgtgttcgacggcaaaaagatcactgtaacagggaccctgtggaacggcaacaaaattatcgacgagcgcctgatcaaccccgacggctccaagctgttccgagtaaccatcaacgtt

SEQ ID NO: 1692 - protein, 158 aa, Artificial Sequence
  Synthetic
VFTLEDFVGDWRQTAAYNLDQVLEQGGVSSLFQNLAVSVTPIQRIVLSGENALKIDIHVIIPYEGLSADQMAQIEKIFKVVYPVDDHHFKVILHYGTLVIDGVTPNMIDYFGRPYEGIAVFDGKKITVTGTLWNGNKIIDERLINPDGSKLFRVTINV

SEQ ID NO: 1693 - DNA, 474 bp, Artificial Sequence
  Synthetic
gtcttcacactcgaagatttcgttggggactggcgacagacagccgcctacaacctggaccaagtccttgaacagggaggtgtgtccagtttgtttcagaatctcgccgtgtccgtaactccgatccaaaggattgtcctgagcggtgaaaatgccctgaagatcgacatccatgtcatcatcccgtatgaaggtctgagcgccgaccaaatggcccagatcgaaaaaatttttaaggtggtgtaccctgtggatgatcatcactttaaggtgatcctgcactatggcacactggtaatcgacggggttacgccgaacatgatcgactatttcggacggccgtatgaaggcatcgccgtgttcgacggcaaaaagatcactgtaacagggaccctgtggaacggcaacaaaattatcgacgagcgcctgatcaaccccgacggctccatgctgttccgagtaaccatcaacgtt

SEQ ID NO: 1694 - protein, 158 aa, Artificial Sequence
  Synthetic
VFTLEDFVGDWRQTAAYNLDQVLEQGGVSSLFQNLAVSVTPIQRIVLSGENALKIDIHVIIPYEGLSADQMAQIEKIFKVVYPVDDHHFKVILHYGTLVIDGVTPNMIDYFGRPYEGIAVFDGKKITVTGTLWNGNKIIDERLINPDGSMLFRVTINV

SEQ ID NO: 1695 - DNA, 474 bp, Artificial Sequence
  Synthetic
gtcttcacactcgaagatttcgttggggactggcgacagacagccgcctacaacctggaccaagtccttgaacagggaggtgtgtccagtttgtttcagaatctcgccgtgtccgtaactccgatccaaaggattgtcctgagcggtgaaaatgccctgaagatcgacatccatgtcatcatcccgtatgaaggtctgagcgccgaccaaatggcccagatcgaaaaaatttttaaggtggtgtaccctgtggatgatcatcactttaaggtgatcctgcactatggcacactggtaatcgacggggttacgccgaacatgatcgactatttcggacggccgtatgaaggcatcgccgtgttcgacggcaaaaagatcactgtaacagggaccctgtggaacggcaacaaaattatcgacgagcgcctgatcaaccccgacggctccaacctgttccgagtaaccatcaacgtt

SEQ ID NO: 1696 - protein, 158 aa, Artificial Sequence
  Synthetic
VFTLEDFVGDWRQTAAYNLDQVLEQGGVSSLFQNLAVSVTPIQRIVLSGENALKIDIHVIIPYEGLSADQMAQIEKIFKVVYPVDDHHFKVILHYGTLVIDGVTPNMIDYFGRPYEGIAVFDGKKITVTGTLWNGNKIIDERLINPDGSNLFRVTINV

SEQ ID NO: 1697 - DNA, 474 bp, Artificial Sequence
  Synthetic
gtcttcacactcgaagatttcgttggggactggcgacagacagccgcctacaacctggaccaagtccttgaacagggaggtgtgtccagtttgtttcagaatctcgccgtgtccgtaactccgatccaaaggattgtcctgagcggtgaaaatgccctgaagatcgacatccatgtcatcatcccgtatgaaggtctgagcgccgaccaaatggcccagatcgaaaaaatttttaaggtggtgtaccctgtggatgatcatcactttaaggtgatcctgcactatggcacactggtaatcgacggggttacgccgaacatgatcgactatttcggacggccgtatgaaggcatcgccgtgttcgacggcaaaaagatcactgtaacagggaccctgtggaacggcaacaaaattatcgacgagcgcctgatcaaccccgacggctcccccctgttccgagtaaccatcaacgtt

SEQ ID NO: 1698 - protein, 158 aa, Artificial Sequence
  Synthetic
VFTLEDFVGDWRQTAAYNLDQVLEQGGVSSLFQNLAVSVTPIQRIVLSGENALKIDIHVIIPYEGLSADQMAQIEKIFKVVYPVDDHHFKVILHYGTLVIDGVTPNMIDYFGRPYEGIAVFDGKKITVTGTLWNGNKIIDERLINPDGSPLFRVTINV

SEQ ID NO: 1699 - DNA, 474 bp, Artificial Sequence
  Synthetic
gtcttcacactcgaagatttcgttggggactggcgacagacagccgcctacaacctggaccaagtccttgaacagggaggtgtgtccagtttgtttcagaatctcgccgtgtccgtaactccgatccaaaggattgtcctgagcggtgaaaatgccctgaagatcgacatccatgtcatcatcccgtatgaaggtctgagcgccgaccaaatggcccagatcgaaaaaatttttaaggtggtgtaccctgtggatgatcatcactttaaggtgatcctgcactatggcacactggtaatcgacggggttacgccgaacatgatcgactatttcggacggccgtatgaaggcatcgccgtgttcgacggcaaaaagatcactgtaacagggaccctgtggaacggcaacaaaattatcgacgagcgcctgatcaaccccgacggctcccagctgttccgagtaaccatcaacgtt

SEQ ID NO: 1700 - protein, 158 aa, Artificial Sequence
  Synthetic
VFTLEDFVGDWRQTAAYNLDQVLEQGGVSSLFQNLAVSVTPIQRIVLSGENALKIDIHVIIPYEGLSADQMAQIEKIFKVVYPVDDHHFKVILHYGTLVIDGVTPNMIDYFGRPYEGIAVFDGKKITVTGTLWNGNKIIDERLINPDGSQLFRVTINV

SEQ ID NO: 1701 - DNA, 474 bp, Artificial Sequence
  Synthetic
gtcttcacactcgaagatttcgttggggactggcgacagacagccgcctacaacctggaccaagtccttgaacagggaggtgtgtccagtttgtttcagaatctcgccgtgtccgtaactccgatccaaaggattgtcctgagcggtgaaaatgccctgaagatcgacatccatgtcatcatcccgtatgaaggtctgagcgccgaccaaatggcccagatcgaaaaaatttttaaggtggtgtaccctgtggatgatcatcactttaaggtgatcctgcactatggcacactggtaatcgacggggttacgccgaacatgatcgactatttcggacggccgtatgaaggcatcgccgtgttcgacggcaaaaagatcactgtaacagggaccctgtggaacggcaacaaaattatcgacgagcgcctgatcaaccccgacggctcccggctgttccgagtaaccatcaacgtt

SEQ ID NO: 1702 - protein, 158 aa, Artificial Sequence
  Synthetic
VFTLEDFVGDWRQTAAYNLDQVLEQGGVSSLFQNLAVSVTPIQRIVLSGENALKIDIHVIIPYEGLSADQMAQIEKIFKVVYPVDDHHFKVILHYGTLVIDGVTPNMIDYFGRPYEGIAVFDGKKITVTGTLWNGNKIIDERLINPDGSRLFRVTINV

SEQ ID NO: 1703 - DNA, 474 bp, Artificial Sequence
  Synthetic
gtcttcacactcgaagatttcgttggggactggcgacagacagccgcctacaacctggaccaagtccttgaacagggaggtgtgtccagtttgtttcagaatctcgccgtgtccgtaactccgatccaaaggattgtcctgagcggtgaaaatgccctgaagatcgacatccatgtcatcatcccgtatgaaggtctgagcgccgaccaaatggcccagatcgaaaaaatttttaaggtggtgtaccctgtggatgatcatcactttaaggtgatcctgcactatggcacactggtaatcgacggggttacgccgaacatgatcgactatttcggacggccgtatgaaggcatcgccgtgttcgacggcaaaaagatcactgtaacagggaccctgtggaacggcaacaaaattatcgacgagcgcctgatcaaccccgacggctccagcctgttccgagtaaccatcaacgtt

SEQ ID NO: 1704 - protein, 158 aa, Artificial Sequence
  Synthetic
VFTLEDFVGDWRQTAAYNLDQVLEQGGVSSLFQNLAVSVTPIQRIVLSGENALKIDIHVIIPYEGLSADQMAQIEKIFKVVYPVDDHHFKVILHYGTLVIDGVTPNMIDYFGRPYEGIAVFDGKKITVTGTLWNGNKIIDERLINPDGSSLFRVTINV

SEQ ID NO: 1705 - DNA, 474 bp, Artificial Sequence
  Synthetic
gtcttcacactcgaagatttcgttggggactggcgacagacagccgcctacaacctggaccaagtccttgaacagggaggtgtgtccagtttgtttcagaatctcgccgtgtccgtaactccgatccaaaggattgtcctgagcggtgaaaatgccctgaagatcgacatccatgtcatcatcccgtatgaaggtctgagcgccgaccaaatggcccagatcgaaaaaatttttaaggtggtgtaccctgtggatgatcatcactttaaggtgatcctgcactatggcacactggtaatcgacggggttacgccgaacatgatcgactatttcggacggccgtatgaaggcatcgccgtgttcgacggcaaaaagatcactgtaacagggaccctgtggaacggcaacaaaattatcgacgagcgcctgatcaaccccgacggctccaccctgttccgagtaaccatcaacgtt

SEQ ID NO: 1706 - protein, 158 aa, Artificial Sequence
  Synthetic
VFTLEDFVGDWRQTAAYNLDQVLEQGGVSSLFQNLAVSVTPIQRIVLSGENALKIDIHVIIPYEGLSADQMAQIEKIFKVVYPVDDHHFKVILHYGTLVIDGVTPNMIDYFGRPYEGIAVFDGKKITVTGTLWNGNKIIDERLINPDGSTLFRVTINV

SEQ ID NO: 1707 - DNA, 474 bp, Artificial Sequence
  Synthetic
gtcttcacactcgaagatttcgttggggactggcgacagacagccgcctacaacctggaccaagtccttgaacagggaggtgtgtccagtttgtttcagaatctcgccgtgtccgtaactccgatccaaaggattgtcctgagcggtgaaaatgccctgaagatcgacatccatgtcatcatcccgtatgaaggtctgagcgccgaccaaatggcccagatcgaaaaaatttttaaggtggtgtaccctgtggatgatcatcactttaaggtgatcctgcactatggcacactggtaatcgacggggttacgccgaacatgatcgactatttcggacggccgtatgaaggcatcgccgtgttcgacggcaaaaagatcactgtaacagggaccctgtggaacggcaacaaaattatcgacgagcgcctgatcaaccccgacggctccgtgctgttccgagtaaccatcaacgtt

SEQ ID NO: 1708 - protein, 158 aa, Artificial Sequence
  Synthetic
VFTLEDFVGDWRQTAAYNLDQVLEQGGVSSLFQNLAVSVTPIQRIVLSGENALKIDIHVIIPYEGLSADQMAQIEKIFKVVYPVDDHHFKVILHYGTLVIDGVTPNMIDYFGRPYEGIAVFDGKKITVTGTLWNGNKIIDERLINPDGSVLFRVTINV

SEQ ID NO: 1709 - DNA, 474 bp, Artificial Sequence
  Synthetic
gtcttcacactcgaagatttcgttggggactggcgacagacagccgcctacaacctggaccaagtccttgaacagggaggtgtgtccagtttgtttcagaatctcgccgtgtccgtaactccgatccaaaggattgtcctgagcggtgaaaatgccctgaagatcgacatccatgtcatcatcccgtatgaaggtctgagcgccgaccaaatggcccagatcgaaaaaatttttaaggtggtgtaccctgtggatgatcatcactttaaggtgatcctgcactatggcacactggtaatcgacggggttacgccgaacatgatcgactatttcggacggccgtatgaaggcatcgccgtgttcgacggcaaaaagatcactgtaacagggaccctgtggaacggcaacaaaattatcgacgagcgcctgatcaaccccgacggctcctggctgttccgagtaaccatcaacgtt

SEQ ID NO: 1710 - protein, 158 aa, Artificial Sequence
  Synthetic
VFTLEDFVGDWRQTAAYNLDQVLEQGGVSSLFQNLAVSVTPIQRIVLSGENALKIDIHVIIPYEGLSADQMAQIEKIFKVVYPVDDHHFKVILHYGTLVIDGVTPNMIDYFGRPYEGIAVFDGKKITVTGTLWNGNKIIDERLINPDGSWLFRVTINV

SEQ ID NO: 1711 - DNA, 474 bp, Artificial Sequence
  Synthetic
gtcttcacactcgaagatttcgttggggactggcgacagacagccgcctacaacctggaccaagtccttgaacagggaggtgtgtccagtttgtttcagaatctcgccgtgtccgtaactccgatccaaaggattgtcctgagcggtgaaaatgccctgaagatcgacatccatgtcatcatcccgtatgaaggtctgagcgccgaccaaatggcccagatcgaaaaaatttttaaggtggtgtaccctgtggatgatcatcactttaaggtgatcctgcactatggcacactggtaatcgacggggttacgccgaacatgatcgactatttcggacggccgtatgaaggcatcgccgtgttcgacggcaaaaagatcactgtaacagggaccctgtggaacggcaacaaaattatcgacgagcgcctgatcaaccccgacggctcctacctgttccgagtaaccatcaacgtt

SEQ ID NO: 1712 - protein, 158 aa, Artificial Sequence
  Synthetic
VFTLEDFVGDWRQTAAYNLDQVLEQGGVSSLFQNLAVSVTPIQRIVLSGENALKIDIHVIIPYEGLSADQMAQIEKIFKVVYPVDDHHFKVILHYGTLVIDGVTPNMIDYFGRPYEGIAVFDGKKITVTGTLWNGNKIIDERLINPDGSYLFRVTINV

SEQ ID NO: 1713 - DNA, 474 bp, Artificial Sequence
  Synthetic
gtcttcacactcgaagatttcgttggggactggcgacagacagccgcctacaacctggaccaagtccttgaacagggaggtgtgtccagtttgtttcagaatctcgccgtgtccgtaactccgatccaaaggattgtcctgagcggtgaaaatgccctgaagatcgacatccatgtcatcatcccgtatgaaggtctgagcgccgaccaaatggcccagatcgaaaaaatttttaaggtggtgtaccctgtggatgatcatcactttaaggtgatcctgcactatggcacactggtaatcgacggggttacgccgaacatgatcgactatttcggacggccgtatgaaggcatcgccgtgttcgacggcaaaaagatcactgtaacagggaccctgtggaacggcaacaaaattatcgacgagcgcctgatcaaccccgacggctccctgctgttccgagtaaccatcaacgcc

SEQ ID NO: 1714 - protein, 158 aa, Artificial Sequence
  Synthetic
VFTLEDFVGDWRQTAAYNLDQVLEQGGVSSLFQNLAVSVTPIQRIVLSGENALKIDIHVIIPYEGLSADQMAQIEKIFKVVYPVDDHHFKVILHYGTLVIDGVTPNMIDYFGRPYEGIAVFDGKKITVTGTLWNGNKIIDERLINPDGSLLFRVTINA

SEQ ID NO: 1715 - DNA, 474 bp, Artificial Sequence
  Synthetic
gtcttcacactcgaagatttcgttggggactggcgacagacagccgcctacaacctggaccaagtccttgaacagggaggtgtgtccagtttgtttcagaatctcgccgtgtccgtaactccgatccaaaggattgtcctgagcggtgaaaatgccctgaagatcgacatccatgtcatcatcccgtatgaaggtctgagcgccgaccaaatggcccagatcgaaaaaatttttaaggtggtgtaccctgtggatgatcatcactttaaggtgatcctgcactatggcacactggtaatcgacggggttacgccgaacatgatcgactatttcggacggccgtatgaaggcatcgccgtgttcgacggcaaaaagatcactgtaacagggaccctgtggaacggcaacaaaattatcgacgagcgcctgatcaaccccgacggctccctgctgttccgagtaaccatcaactgc

SEQ ID NO: 1716 - protein, 158 aa, Artificial Sequence
  Synthetic
VFTLEDFVGDWRQTAAYNLDQVLEQGGVSSLFQNLAVSVTPIQRIVLSGENALKIDIHVIIPYEGLSADQMAQIEKIFKVVYPVDDHHFKVILHYGTLVIDGVTPNMIDYFGRPYEGIAVFDGKKITVTGTLWNGNKIIDERLINPDGSLLFRVTINC

SEQ ID NO: 1717 - DNA, 474 bp, Artificial Sequence
  Synthetic
gtcttcacactcgaagatttcgttggggactggcgacagacagccgcctacaacctggaccaagtccttgaacagggaggtgtgtccagtttgtttcagaatctcgccgtgtccgtaactccgatccaaaggattgtcctgagcggtgaaaatgccctgaagatcgacatccatgtcatcatcccgtatgaaggtctgagcgccgaccaaatggcccagatcgaaaaaatttttaaggtggtgtaccctgtggatgatcatcactttaaggtgatcctgcactatggcacactggtaatcgacggggttacgccgaacatgatcgactatttcggacggccgtatgaaggcatcgccgtgttcgacggcaaaaagatcactgtaacagggaccctgtggaacggcaacaaaattatcgacgagcgcctgatcaaccccgacggctccctgctgttccgagtaaccatcaacgac

SEQ ID NO: 1718 - protein, 158 aa, Artificial Sequence
  Synthetic
VFTLEDFVGDWRQTAAYNLDQVLEQGGVSSLFQNLAVSVTPIQRIVLSGENALKIDIHVIIPYEGLSADQMAQIEKIFKVVYPVDDHHFKVILHYGTLVIDGVTPNMIDYFGRPYEGIAVFDGKKITVTGTLWNGNKIIDERLINPDGSLLFRVTIND

SEQ ID NO: 1719 - DNA, 474 bp, Artificial Sequence
  Synthetic
gtcttcacactcgaagatttcgttggggactggcgacagacagccgcctacaacctggaccaagtccttgaacagggaggtgtgtccagtttgtttcagaatctcgccgtgtccgtaactccgatccaaaggattgtcctgagcggtgaaaatgccctgaagatcgacatccatgtcatcatcccgtatgaaggtctgagcgccgaccaaatggcccagatcgaaaaaatttttaaggtggtgtaccctgtggatgatcatcactttaaggtgatcctgcactatggcacactggtaatcgacggggttacgccgaacatgatcgactatttcggacggccgtatgaaggcatcgccgtgttcgacggcaaaaagatcactgtaacagggaccctgtggaacggcaacaaaattatcgacgagcgcctgatcaaccccgacggctccctgctgttccgagtaaccatcaacgag

SEQ ID NO: 1720 - protein, 158 aa, Artificial Sequence
  Synthetic
VFTLEDFVGDWRQTAAYNLDQVLEQGGVSSLFQNLAVSVTPIQRIVLSGENALKIDIHVIIPYEGLSADQMAQIEKIFKVVYPVDDHHFKVILHYGTLVIDGVTPNMIDYFGRPYEGIAVFDGKKITVTGTLWNGNKIIDERLINPDGSLLFRVTINE

SEQ ID NO: 1721 - DNA, 474 bp, Artificial Sequence
  Synthetic
gtcttcacactcgaagatttcgttggggactggcgacagacagccgcctacaacctggaccaagtccttgaacagggaggtgtgtccagtttgtttcagaatctcgccgtgtccgtaactccgatccaaaggattgtcctgagcggtgaaaatgccctgaagatcgacatccatgtcatcatcccgtatgaaggtctgagcgccgaccaaatggcccagatcgaaaaaatttttaaggtggtgtaccctgtggatgatcatcactttaaggtgatcctgcactatggcacactggtaatcgacggggttacgccgaacatgatcgactatttcggacggccgtatgaaggcatcgccgtgttcgacggcaaaaagatcactgtaacagggaccctgtggaacggcaacaaaattatcgacgagcgcctgatcaaccccgacggctccctgctgttccgagtaaccatcaacttc

SEQ ID NO: 1722 - protein, 158 aa, Artificial Sequence
  Synthetic
VFTLEDFVGDWRQTAAYNLDQVLEQGGVSSLFQNLAVSVTPIQRIVLSGENALKIDIHVIIPYEGLSADQMAQIEKIFKVVYPVDDHHFKVILHYGTLVIDGVTPNMIDYFGRPYEGIAVFDGKKITVTGTLWNGNKIIDERLINPDGSLLFRVTINF

SEQ ID NO: 1723 - DNA, 474 bp, Artificial Sequence
  Synthetic
gtcttcacactcgaagatttcgttggggactggcgacagacagccgcctacaacctggaccaagtccttgaacagggaggtgtgtccagtttgtttcagaatctcgccgtgtccgtaactccgatccaaaggattgtcctgagcggtgaaaatgccctgaagatcgacatccatgtcatcatcccgtatgaaggtctgagcgccgaccaaatggcccagatcgaaaaaatttttaaggtggtgtaccctgtggatgatcatcactttaaggtgatcctgcactatggcacactggtaatcgacggggttacgccgaacatgatcgactatttcggacggccgtatgaaggcatcgccgtgttcgacggcaaaaagatcactgtaacagggaccctgtggaacggcaacaaaattatcgacgagcgcctgatcaaccccgacggctccctgctgttccgagtaaccatcaacggc

SEQ ID NO: 1724 - protein, 158 aa, Artificial Sequence
  Synthetic
VFTLEDFVGDWRQTAAYNLDQVLEQGGVSSLFQNLAVSVTPIQRIVLSGENALKIDIHVIIPYEGLSADQMAQIEKIFKVVYPVDDHHFKVILHYGTLVIDGVTPNMIDYFGRPYEGIAVFDGKKITVTGTLWNGNKIIDERLINPDGSLLFRVTING

SEQ ID NO: 1725 - DNA, 474 bp, Artificial Sequence
  Synthetic
gtcttcacactcgaagatttcgttggggactggcgacagacagccgcctacaacctggaccaagtccttgaacagggaggtgtgtccagtttgtttcagaatctcgccgtgtccgtaactccgatccaaaggattgtcctgagcggtgaaaatgccctgaagatcgacatccatgtcatcatcccgtatgaaggtctgagcgccgaccaaatggcccagatcgaaaaaatttttaaggtggtgtaccctgtggatgatcatcactttaaggtgatcctgcactatggcacactggtaatcgacggggttacgccgaacatgatcgactatttcggacggccgtatgaaggcatcgccgtgttcgacggcaaaaagatcactgtaacagggaccctgtggaacggcaacaaaattatcgacgagcgcctgatcaaccccgacggctccctgctgttccgagtaaccatcaaccac

SEQ ID NO: 1726 - protein, 158 aa, Artificial Sequence
  Synthetic
VFTLEDFVGDWRQTAAYNLDQVLEQGGVSSLFQNLAVSVTPIQRIVLSGENALKIDIHVIIPYEGLSADQMAQIEKIFKVVYPVDDHHFKVILHYGTLVIDGVTPNMIDYFGRPYEGIAVFDGKKITVTGTLWNGNKIIDERLINPDGSLLFRVTINH

SEQ ID NO: 1727 - DNA, 474 bp, Artificial Sequence
  Synthetic
gtcttcacactcgaagatttcgttggggactggcgacagacagccgcctacaacctggaccaagtccttgaacagggaggtgtgtccagtttgtttcagaatctcgccgtgtccgtaactccgatccaaaggattgtcctgagcggtgaaaatgccctgaagatcgacatccatgtcatcatcccgtatgaaggtctgagcgccgaccaaatggcccagatcgaaaaaatttttaaggtggtgtaccctgtggatgatcatcactttaaggtgatcctgcactatggcacactggtaatcgacggggttacgccgaacatgatcgactatttcggacggccgtatgaaggcatcgccgtgttcgacggcaaaaagatcactgtaacagggaccctgtggaacggcaacaaaattatcgacgagcgcctgatcaaccccgacggctccctgctgttccgagtaaccatcaacatc

SEQ ID NO: 1728 - protein, 158 aa, Artificial Sequence
  Synthetic
VFTLEDFVGDWRQTAAYNLDQVLEQGGVSSLFQNLAVSVTPIQRIVLSGENALKIDIHVIIPYEGLSADQMAQIEKIFKVVYPVDDHHFKVILHYGTLVIDGVTPNMIDYFGRPYEGIAVFDGKKITVTGTLWNGNKIIDERLINPDGSLLFRVTINI

SEQ ID NO: 1729 - DNA, 474 bp, Artificial Sequence
  Synthetic
gtcttcacactcgaagatttcgttggggactggcgacagacagccgcctacaacctggaccaagtccttgaacagggaggtgtgtccagtttgtttcagaatctcgccgtgtccgtaactccgatccaaaggattgtcctgagcggtgaaaatgccctgaagatcgacatccatgtcatcatcccgtatgaaggtctgagcgccgaccaaatggcccagatcgaaaaaatttttaaggtggtgtaccctgtggatgatcatcactttaaggtgatcctgcactatggcacactggtaatcgacggggttacgccgaacatgatcgactatttcggacggccgtatgaaggcatcgccgtgttcgacggcaaaaagatcactgtaacagggaccctgtggaacggcaacaaaattatcgacgagcgcctgatcaaccccgacggctccctgctgttccgagtaaccatcaacaag

SEQ ID NO: 1730 - protein, 158 aa, Artificial Sequence
  Synthetic
VFTLEDFVGDWRQTAAYNLDQVLEQGGVSSLFQNLAVSVTPIQRIVLSGENALKIDIHVIIPYEGLSADQMAQIEKIFKVVYPVDDHHFKVILHYGTLVIDGVTPNMIDYFGRPYEGIAVFDGKKITVTGTLWNGNKIIDERLINPDGSLLFRVTINK

SEQ ID NO: 1731 - DNA, 474 bp, Artificial Sequence
  Synthetic
gtcttcacactcgaagatttcgttggggactggcgacagacagccgcctacaacctggaccaagtccttgaacagggaggtgtgtccagtttgtttcagaatctcgccgtgtccgtaactccgatccaaaggattgtcctgagcggtgaaaatgccctgaagatcgacatccatgtcatcatcccgtatgaaggtctgagcgccgaccaaatggcccagatcgaaaaaatttttaaggtggtgtaccctgtggatgatcatcactttaaggtgatcctgcactatggcacactggtaatcgacggggttacgccgaacatgatcgactatttcggacggccgtatgaaggcatcgccgtgttcgacggcaaaaagatcactgtaacagggaccctgtggaacggcaacaaaattatcgacgagcgcctgatcaaccccgacggctccctgctgttccgagtaaccatcaacctg

SEQ ID NO: 1732 - protein, 158 aa, Artificial Sequence
  Synthetic
VFTLEDFVGDWRQTAAYNLDQVLEQGGVSSLFQNLAVSVTPIQRIVLSGENALKIDIHVIIPYEGLSADQMAQIEKIFKVVYPVDDHHFKVILHYGTLVIDGVTPNMIDYFGRPYEGIAVFDGKKITVTGTLWNGNKIIDERLINPDGSLLFRVTINL

SEQ ID NO: 1733 - DNA, 474 bp, Artificial Sequence
  Synthetic
gtcttcacactcgaagatttcgttggggactggcgacagacagccgcctacaacctggaccaagtccttgaacagggaggtgtgtccagtttgtttcagaatctcgccgtgtccgtaactccgatccaaaggattgtcctgagcggtgaaaatgccctgaagatcgacatccatgtcatcatcccgtatgaaggtctgagcgccgaccaaatggcccagatcgaaaaaatttttaaggtggtgtaccctgtggatgatcatcactttaaggtgatcctgcactatggcacactggtaatcgacggggttacgccgaacatgatcgactatttcggacggccgtatgaaggcatcgccgtgttcgacggcaaaaagatcactgtaacagggaccctgtggaacggcaacaaaattatcgacgagcgcctgatcaaccccgacggctccctgctgttccgagtaaccatcaacatg

SEQ ID NO: 1734 - protein, 158 aa, Artificial Sequence
  Synthetic
VFTLEDFVGDWRQTAAYNLDQVLEQGGVSSLFQNLAVSVTPIQRIVLSGENALKIDIHVIIPYEGLSADQMAQIEKIFKVVYPVDDHHFKVILHYGTLVIDGVTPNMIDYFGRPYEGIAVFDGKKITVTGTLWNGNKIIDERLINPDGSLLFRVTINM

SEQ ID NO: 1735 - DNA, 474 bp, Artificial Sequence
  Synthetic
gtcttcacactcgaagatttcgttggggactggcgacagacagccgcctacaacctggaccaagtccttgaacagggaggtgtgtccagtttgtttcagaatctcgccgtgtccgtaactccgatccaaaggattgtcctgagcggtgaaaatgccctgaagatcgacatccatgtcatcatcccgtatgaaggtctgagcgccgaccaaatggcccagatcgaaaaaatttttaaggtggtgtaccctgtggatgatcatcactttaaggtgatcctgcactatggcacactggtaatcgacggggttacgccgaacatgatcgactatttcggacggccgtatgaaggcatcgccgtgttcgacggcaaaaagatcactgtaacagggaccctgtggaacggcaacaaaattatcgacgagcgcctgatcaaccccgacggctccctgctgttccgagtaaccatcaacaac

SEQ ID NO: 1736 - protein, 158 aa, Artificial Sequence
  Synthetic
VFTLEDFVGDWRQTAAYNLDQVLEQGGVSSLFQNLAVSVTPIQRIVLSGENALKIDIHVIIPYEGLSADQMAQIEKIFKVVYPVDDHHFKVILHYGTLVIDGVTPNMIDYFGRPYEGIAVFDGKKITVTGTLWNGNKIIDERLINPDGSLLFRVTINN

SEQ ID NO: 1737 - DNA, 474 bp, Artificial Sequence
  Synthetic
gtcttcacactcgaagatttcgttggggactggcgacagacagccgcctacaacctggaccaagtccttgaacagggaggtgtgtccagtttgtttcagaatctcgccgtgtccgtaactccgatccaaaggattgtcctgagcggtgaaaatgccctgaagatcgacatccatgtcatcatcccgtatgaaggtctgagcgccgaccaaatggcccagatcgaaaaaatttttaaggtggtgtaccctgtggatgatcatcactttaaggtgatcctgcactatggcacactggtaatcgacggggttacgccgaacatgatcgactatttcggacggccgtatgaaggcatcgccgtgttcgacggcaaaaagatcactgtaacagggaccctgtggaacggcaacaaaattatcgacgagcgcctgatcaaccccgacggctccctgctgttccgagtaaccatcaacccc

SEQ ID NO: 1738 - protein, 158 aa, Artificial Sequence
  Synthetic
VFTLEDFVGDWRQTAAYNLDQVLEQGGVSSLFQNLAVSVTPIQRIVLSGENALKIDIHVIIPYEGLSADQMAQIEKIFKVVYPVDDHHFKVILHYGTLVIDGVTPNMIDYFGRPYEGIAVFDGKKITVTGTLWNGNKIIDERLINPDGSLLFRVTINP

SEQ ID NO: 1739 - DNA, 474 bp, Artificial Sequence
  Synthetic
gtcttcacactcgaagatttcgttggggactggcgacagacagccgcctacaacctggaccaagtccttgaacagggaggtgtgtccagtttgtttcagaatctcgccgtgtccgtaactccgatccaaaggattgtcctgagcggtgaaaatgccctgaagatcgacatccatgtcatcatcccgtatgaaggtctgagcgccgaccaaatggcccagatcgaaaaaatttttaaggtggtgtaccctgtggatgatcatcactttaaggtgatcctgcactatggcacactggtaatcgacggggttacgccgaacatgatcgactatttcggacggccgtatgaaggcatcgccgtgttcgacggcaaaaagatcactgtaacagggaccctgtggaacggcaacaaaattatcgacgagcgcctgatcaaccccgacggctccctgctgttccgagtaaccatcaaccag

SEQ ID NO: 1740 - protein, 158 aa, Artificial Sequence
  Synthetic
VFTLEDFVGDWRQTAAYNLDQVLEQGGVSSLFQNLAVSVTPIQRIVLSGENALKIDIHVIIPYEGLSADQMAQIEKIFKVVYPVDDHHFKVILHYGTLVIDGVTPNMIDYFGRPYEGIAVFDGKKITVTGTLWNGNKIIDERLINPDGSLLFRVTINQ

SEQ ID NO: 1741 - DNA, 474 bp, Artificial Sequence
  Synthetic
gtcttcacactcgaagatttcgttggggactggcgacagacagccgcctacaacctggaccaagtccttgaacagggaggtgtgtccagtttgtttcagaatctcgccgtgtccgtaactccgatccaaaggattgtcctgagcggtgaaaatgccctgaagatcgacatccatgtcatcatcccgtatgaaggtctgagcgccgaccaaatggcccagatcgaaaaaatttttaaggtggtgtaccctgtggatgatcatcactttaaggtgatcctgcactatggcacactggtaatcgacggggttacgccgaacatgatcgactatttcggacggccgtatgaaggcatcgccgtgttcgacggcaaaaagatcactgtaacagggaccctgtggaacggcaacaaaattatcgacgagcgcctgatcaaccccgacggctccctgctgttccgagtaaccatcaaccgg

SEQ ID NO: 1742 - protein, 158 aa, Artificial Sequence
  Synthetic
VFTLEDFVGDWRQTAAYNLDQVLEQGGVSSLFQNLAVSVTPIQRIVLSGENALKIDIHVIIPYEGLSADQMAQIEKIFKVVYPVDDHHFKVILHYGTLVIDGVTPNMIDYFGRPYEGIAVFDGKKITVTGTLWNGNKIIDERLINPDGSLLFRVTINR

SEQ ID NO: 1743 - DNA, 474 bp, Artificial Sequence
  Synthetic
gtcttcacactcgaagatttcgttggggactggcgacagacagccgcctacaacctggaccaagtccttgaacagggaggtgtgtccagtttgtttcagaatctcgccgtgtccgtaactccgatccaaaggattgtcctgagcggtgaaaatgccctgaagatcgacatccatgtcatcatcccgtatgaaggtctgagcgccgaccaaatggcccagatcgaaaaaatttttaaggtggtgtaccctgtggatgatcatcactttaaggtgatcctgcactatggcacactggtaatcgacggggttacgccgaacatgatcgactatttcggacggccgtatgaaggcatcgccgtgttcgacggcaaaaagatcactgtaacagggaccctgtggaacggcaacaaaattatcgacgagcgcctgatcaaccccgacggctccctgctgttccgagtaaccatcaacagc

SEQ ID NO: 1744 - protein, 158 aa, Artificial Sequence
  Synthetic
VFTLEDFVGDWRQTAAYNLDQVLEQGGVSSLFQNLAVSVTPIQRIVLSGENALKIDIHVIIPYEGLSADQMAQIEKIFKVVYPVDDHHFKVILHYGTLVIDGVTPNMIDYFGRPYEGIAVFDGKKITVTGTLWNGNKIIDERLINPDGSLLFRVTINS

SEQ ID NO: 1745 - DNA, 474 bp, Artificial Sequence
  Synthetic
gtcttcacactcgaagatttcgttggggactggcgacagacagccgcctacaacctggaccaagtccttgaacagggaggtgtgtccagtttgtttcagaatctcgccgtgtccgtaactccgatccaaaggattgtcctgagcggtgaaaatgccctgaagatcgacatccatgtcatcatcccgtatgaaggtctgagcgccgaccaaatggcccagatcgaaaaaatttttaaggtggtgtaccctgtggatgatcatcactttaaggtgatcctgcactatggcacactggtaatcgacggggttacgccgaacatgatcgactatttcggacggccgtatgaaggcatcgccgtgttcgacggcaaaaagatcactgtaacagggaccctgtggaacggcaacaaaattatcgacgagcgcctgatcaaccccgacggctccctgctgttccgagtaaccatcaacacc

SEQ ID NO: 1746 - protein, 158 aa, Artificial Sequence
  Synthetic
VFTLEDFVGDWRQTAAYNLDQVLEQGGVSSLFQNLAVSVTPIQRIVLSGENALKIDIHVIIPYEGLSADQMAQIEKIFKVVYPVDDHHFKVILHYGTLVIDGVTPNMIDYFGRPYEGIAVFDGKKITVTGTLWNGNKIIDERLINPDGSLLFRVTINT

SEQ ID NO: 1747 - DNA, 474 bp, Artificial Sequence
  Synthetic
gtcttcacactcgaagatttcgttggggactggcgacagacagccgcctacaacctggaccaagtccttgaacagggaggtgtgtccagtttgtttcagaatctcgccgtgtccgtaactccgatccaaaggattgtcctgagcggtgaaaatgccctgaagatcgacatccatgtcatcatcccgtatgaaggtctgagcgccgaccaaatggcccagatcgaaaaaatttttaaggtggtgtaccctgtggatgatcatcactttaaggtgatcctgcactatggcacactggtaatcgacggggttacgccgaacatgatcgactatttcggacggccgtatgaaggcatcgccgtgttcgacggcaaaaagatcactgtaacagggaccctgtggaacggcaacaaaattatcgacgagcgcctgatcaaccccgacggctccctgctgttccgagtaaccatcaactgg

SEQ ID NO: 1748 - protein, 158 aa, Artificial Sequence
  Synthetic
VFTLEDFVGDWRQTAAYNLDQVLEQGGVSSLFQNLAVSVTPIQRIVLSGENALKIDIHVIIPYEGLSADQMAQIEKIFKVVYPVDDHHFKVILHYGTLVIDGVTPNMIDYFGRPYEGIAVFDGKKITVTGTLWNGNKIIDERLINPDGSLLFRVTINW

SEQ ID NO: 1749 - DNA, 474 bp, Artificial Sequence
  Synthetic
gtcttcacactcgaagatttcgttggggactggcgacagacagccgcctacaacctggaccaagtccttgaacagggaggtgtgtccagtttgtttcagaatctcgccgtgtccgtaactccgatccaaaggattgtcctgagcggtgaaaatgccctgaagatcgacatccatgtcatcatcccgtatgaaggtctgagcgccgaccaaatggcccagatcgaaaaaatttttaaggtggtgtaccctgtggatgatcatcactttaaggtgatcctgcactatggcacactggtaatcgacggggttacgccgaacatgatcgactatttcggacggccgtatgaaggcatcgccgtgttcgacggcaaaaagatcactgtaacagggaccctgtggaacggcaacaaaattatcgacgagcgcctgatcaaccccgacggctccctgctgttccgagtaaccatcaactac

SEQ ID NO: 1750 - protein, 158 aa, Artificial Sequence
  Synthetic
VFTLEDFVGDWRQTAAYNLDQVLEQGGVSSLFQNLAVSVTPIQRIVLSGENALKIDIHVIIPYEGLSADQMAQIEKIFKVVYPVDDHHFKVILHYGTLVIDGVTPNMIDYFGRPYEGIAVFDGKKITVTGTLWNGNKIIDERLINPDGSLLFRVTINY

SEQ ID NO: 1751 - DNA, 474 bp, Artificial Sequence
  Synthetic
gtcttcacactcgaagatttcgttggggactggcgacagacagccgcctacaacctggacaaggtccttgaacagggaggtgtgtccagtttgtttcagaatctcgccgtgtccgtaactccgatccaaaggattgtcctgagcggtgaaaatgccctgaagatcgacatccatgtcatcatcccgtatgaaggtctgagcgccgaccaaatggcccagatcgaaaaaatttttaaggtggtgtaccctgtggatgatcatcactttaaggtgatcctgcactatggcacactggtaatcgacggggttacgccgaacatgatcgactatttcggacggccgtatgaaggcatcgccgtgttcgacggcaaaaagatcactgtaacagggaccctgtggaacggcaacaaaattatcgacgagcgcctgatcaaccccgacggctccctgctgttccgagtaaccatcaacgtt

SEQ ID NO: 1752 - protein, 158 aa, Artificial Sequence
  Synthetic
VFTLEDFVGDWRQTAAYNLDKVLEQGGVSSLFQNLAVSVTPIQRIVLSGENALKIDIHVIIPYEGLSADQMAQIEKIFKVVYPVDDHHFKVILHYGTLVIDGVTPNMIDYFGRPYEGIAVFDGKKITVTGTLWNGNKIIDERLINPDGSLLFRVTINV

SEQ ID NO: 1753 - DNA, 474 bp, Artificial Sequence
  Synthetic
gtcttcacactcgaagatttcgttggggactggcgacagacagccgcctacaacctggaccaagtccttgaacagggaggtatgtccagtttgtttcagaatctcgccgtgtccgtaactccgatccaaaggattgtcctgagcggtgaaaatgccctgaagatcgacatccatgtcatcatcccgtatgaaggtctgagcgccgaccaaatggcccagatcgaaaaaatttttaaggtggtgtaccctgtggatgatcatcactttaaggtgatcctgcactatggcacactggtaatcgacggggttacgccgaacatgatcgactatttcggacggccgtatgaaggcatcgccgtgttcgacggcaaaaagatcactgtaacagggaccctgtggaacggcaacaaaattatcgacgagcgcctgatcaaccccgacggctccctgctgttccgagtaaccatcaacgtt

SEQ ID NO: 1754 - protein, 158 aa, Artificial Sequence
  Synthetic
VFTLEDFVGDWRQTAAYNLDQVLEQGGMSSLFQNLAVSVTPIQRIVLSGENALKIDIHVIIPYEGLSADQMAQIEKIFKVVYPVDDHHFKVILHYGTLVIDGVTPNMIDYFGRPYEGIAVFDGKKITVTGTLWNGNKIIDERLINPDGSLLFRVTINV

SEQ ID NO: 1755 - DNA, 474 bp, Artificial Sequence
  Synthetic
gtcttcacactcgaagatttcgttggggactggcgacagacagccgcctacaacctggaccaagtccttgaacagggaggtgtgtccagtttgtttcagaagctcgccgtgtccgtaactccgatccaaaggattgtcctgagcggtgaaaatgccctgaagatcgacatccatgtcatcatcccgtatgaaggtctgagcgccgaccaaatggcccagatcgaaaaaatttttaaggtggtgtaccctgtggatgatcatcactttaaggtgatcctgcactatggcacactggtaatcgacggggttacgccgaacatgatcgactatttcggacggccgtatgaaggcatcgccgtgttcgacggcaaaaagatcactgtaacagggaccctgtggaacggcaacaaaattatcgacgagcgcctgatcaaccccgacggctccctgctgttccgagtaaccatcaacgtt

SEQ ID NO: 1756 - protein, 158 aa, Artificial Sequence
  Synthetic
VFTLEDFVGDWRQTAAYNLDQVLEQGGVSSLFQKLAVSVTPIQRIVLSGENALKIDIHVIIPYEGLSADQMAQIEKIFKVVYPVDDHHFKVILHYGTLVIDGVTPNMIDYFGRPYEGIAVFDGKKITVTGTLWNGNKIIDERLINPDGSLLFRVTINV

SEQ ID NO: 1757 - DNA, 474 bp, Artificial Sequence
  Synthetic
gtcttcacactcgaagatttcgttggggactggcgacagacagccgcctacaacctggaccaagtccttgaacagggaggtgtgtccagtttgtttcagaatctcgccgtgtccatcactccgatccaaaggattgtcctgagcggtgaaaatgccctgaagatcgacatccatgtcatcatcccgtatgaaggtctgagcgccgaccaaatggcccagatcgaaaaaatttttaaggtggtgtaccctgtggatgatcatcactttaaggtgatcctgcactatggcacactggtaatcgacggggttacgccgaacatgatcgactatttcggacggccgtatgaaggcatcgccgtgttcgacggcaaaaagatcactgtaacagggaccctgtggaacggcaacaaaattatcgacgagcgcctgatcaaccccgacggctccctgctgttccgagtaaccatcaacgtt

SEQ ID NO: 1758 - protein, 158 aa, Artificial Sequence
  Synthetic
VFTLEDFVGDWRQTAAYNLDQVLEQGGVSSLFQNLAVSITPIQRIVLSGENALKIDIHVIIPYEGLSADQMAQIEKIFKVVYPVDDHHFKVILHYGTLVIDGVTPNMIDYFGRPYEGIAVFDGKKITVTGTLWNGNKIIDERLINPDGSLLFRVTINV

SEQ ID NO: 1759 - DNA, 474 bp, Artificial Sequence
  Synthetic
gtcttcacactcgaagatttcgttggggactggcgacagacagccgcctacaacctggaccaagtccttgaacagggaggtgtgtccagtttgtttcagaatctcgccgtgtccgtaactccgatccaaaggattgtcctgagcggtgaaaatgccctgaagatcgacaaccatgtcatcatcccgtatgaaggtctgagcgccgaccaaatggcccagatcgaaaaaatttttaaggtggtgtaccctgtggatgatcatcactttaaggtgatcctgcactatggcacactggtaatcgacggggttacgccgaacatgatcgactatttcggacggccgtatgaaggcatcgccgtgttcgacggcaaaaagatcactgtaacagggaccctgtggaacggcaacaaaattatcgacgagcgcctgatcaaccccgacggctccctgctgttccgagtaaccatcaacgtt

SEQ ID NO: 1760 - protein, 158 aa, Artificial Sequence
  Synthetic
VFTLEDFVGDWRQTAAYNLDQVLEQGGVSSLFQNLAVSVTPIQRIVLSGENALKIDNHVIIPYEGLSADQMAQIEKIFKVVYPVDDHHFKVILHYGTLVIDGVTPNMIDYFGRPYEGIAVFDGKKITVTGTLWNGNKIIDERLINPDGSLLFRVTINV

SEQ ID NO: 1761 - DNA, 474 bp, Artificial Sequence
  Synthetic
gtcttcacactcgaagatttcgttggggactggcgacagacagccgcctacaacctggaccaagtccttgaacagggaggtgtgtccagtttgtttcagaatctcgccgtgtccgtaactccgatccaaaggattgtcctgagcggtgaaaatgccctgaagatcgacatccatgtcatcatcccgtatgaaggtctgagcgccgaccaaatggcccagatcgaaaaaatttttaaggtggtgtaccctgtggatgatcatcactttaaggtgatcctgcactatggcacactggtaatcgacggggttacgccgaacatgatcaactatttcggacggccgtatgaaggcatcgccgtgttcgacggcaaaaagatcactgtaacagggaccctgtggaacggcaacaaaattatcgacgagcgcctgatcaaccccgacggctccctgctgttccgagtaaccatcaacgtt

SEQ ID NO: 1762 - protein, 158 aa, Artificial Sequence
  Synthetic
VFTLEDFVGDWRQTAAYNLDQVLEQGGVSSLFQNLAVSVTPIQRIVLSGENALKIDIHVIIPYEGLSADQMAQIEKIFKVVYPVDDHHFKVILHYGTLVIDGVTPNMINYFGRPYEGIAVFDGKKITVTGTLWNGNKIIDERLINPDGSLLFRVTINV

SEQ ID NO: 1763 - DNA, 474 bp, Artificial Sequence
  Synthetic
gtcttcacactcgaagatttcgttggggactggcgacagacagccgcctacaacctggaccaagtccttgaacagggaggtgtgtccagtttgtttcagaatctcgccgtgtccgtaactccgatccaaaggattgtcctgagcggtgaaaatgccctgaagatcgacatccatgtcatcatcccgtatgaaggtctgagcgccgaccaaatggcccagatcgaaaaaatttttaaggtggtgtaccctgtggatgatcatcactttaaggtgatcctgcactatggcacactggtaatcgacggggttacgccgaacatgatcgactatttcggacggccgtatgaaggcatcgccgtgttcgacggcaaaaagatcactgtaacagggaccctgtggaacggcaacaaaattatcgacgagcgcctgatcacccccgacggctccctgctgttccgagtaaccatcaacgtt

SEQ ID NO: 1764 - protein, 158 aa, Artificial Sequence
  Synthetic
VFTLEDFVGDWRQTAAYNLDQVLEQGGVSSLFQNLAVSVTPIQRIVLSGENALKIDIHVIIPYEGLSADQMAQIEKIFKVVYPVDDHHFKVILHYGTLVIDGVTPNMIDYFGRPYEGIAVFDGKKITVTGTLWNGNKIIDERLITPDGSLLFRVTINV

SEQ ID NO: 1765 - DNA, 474 bp, Artificial Sequence
  Synthetic
gtcttcacactcgaagatttcgttggggactggcgacagacagccgcctacaacctggaccaagtccttgaacagggaggtatgtccagtttgtttcagaatctcggggtgtccgtaactccgatccaaaggattgtcctgagcggtgaaaatgccctgaagatcgacatccatgtcatcatcccgtatgaaggtctgagcgccgaccaaatggcccagatcgaaaaaatttttaaggtggtgtaccctgtggatgatcatcactttaaggtgatcctgcactatggcacactggtaatcgacggggttacgccgaacatgatcgactatttcggacggccgtatgaaggcatcgccgtgttcgacggcaaaaagatcactgtaacagggaccctgtggaacggcaacaaaattatcgacgagcgcctgatcaaccccgacggctccctgctgttccgagtaaccatcaacgtt

SEQ ID NO: 1766 - protein, 158 aa, Artificial Sequence
  Synthetic
VFTLEDFVGDWRQTAAYNLDQVLEQGGMSSLFQNLGVSVTPIQRIVLSGENALKIDIHVIIPYEGLSADQMAQIEKIFKVVYPVDDHHFKVILHYGTLVIDGVTPNMIDYFGRPYEGIAVFDGKKITVTGTLWNGNKIIDERLINPDGSLLFRVTINV

SEQ ID NO: 1767 - DNA, 474 bp, Artificial Sequence
  Synthetic
gtcttcacactcgaagatttcgttggggactggcgacagacagccgcctacaacctggaccaagtccttgaacagggaggtgtgtccagtttgtttcagaatctcgccgtgtccgtaactccgatccaaaggattgtcctgagcggtgaaaatgccctgaagatcgacatccatgtcatcatcccgtatgaaggtctgagcgccgaccaaatgggccagatcgaagagatttttaaggtggtgtaccctgtggatgatcatcactttaaggtgatcctgcactatggcacactggtaatcgacggggttacgccgaacatgatcgactatttcggacggccgtatgaaggcatcgccgtgttcgacggcaaaaagatcactgtaacagggaccctgtggaacggcaacaaaattatcgacgagcgcctgatcaaccccgacggctccctgctgttccgagtaaccatcaacgtt

SEQ ID NO: 1768 - protein, 158 aa, Artificial Sequence
  Synthetic
VFTLEDFVGDWRQTAAYNLDQVLEQGGVSSLFQNLAVSVTPIQRIVLSGENALKIDIHVIIPYEGLSADQMGQIEEIFKVVYPVDDHHFKVILHYGTLVIDGVTPNMIDYFGRPYEGIAVFDGKKITVTGTLWNGNKIIDERLINPDGSLLFRVTINV

SEQ ID NO: 1769 - DNA, 474 bp, Artificial Sequence
  Synthetic
gtcttcacactcgaagatttcgttggggactgggaacagacagccgcctacaacctggaccaagtccttgaacagggaggtgtgtccagtttgtttcagaatctcgccgtgtccgtaactccgatccaaaggattgtcctgagcggtgaaaatgccctgaagatcgacatccatgtcatcatcccgtatgaaggtctgagcgccgaccaaatggcccagatcgaaaaaatttttaaggtggtgtaccctgtggatgatcatcactttaaggtgatcctgcactatggcacactggtaatcgacggggttacgccgaacatgatcgactatttcggacggccgtatgaaggcatcgccgtgttcgacggcaaaaagatcactgtaacagggaccctgtggaacggcaacaaaattatcgacgagcgcctgatcaaccccgacggctccatgctgttccgagtaaccatcaacgtt

SEQ ID NO: 1770 - protein, 158 aa, Artificial Sequence
  Synthetic
VFTLEDFVGDWEQTAAYNLDQVLEQGGVSSLFQNLAVSVTPIQRIVLSGENALKIDIHVIIPYEGLSADQMAQIEKIFKVVYPVDDHHFKVILHYGTLVIDGVTPNMIDYFGRPYEGIAVFDGKKITVTGTLWNGNKIIDERLINPDGSMLFRVTINV

SEQ ID NO: 1771 - DNA, 474 bp, Artificial Sequence
  Synthetic
gtcttcacactcgaagatttcgttggggactgggaacagacagccgcctacaacctggaccaagtccttgaacagggaggtgtgtccagtttgtttcagaatctcgccgtgtccgtaactccgatccaaaggattgtcctgagcggtgaaaatgccctgaagatcgacatccatgtcatcatcccgtatgaaggtctgagcgccgaccaaatggcccagatcgaaaaaatttttaaggtggtgtaccctgtggatgatcatcactttaaggtgatcctgcactatggcacactggtaatcgacggggttacgccgaacatgatcgactatttcggacggccgtatgaaggcatcgccgtgttcgacggcaaaaagatcactgtaacagggaccctgtggaacggcaacaaaattatcgacgagcgcctgatcaaccccgacggctccctgctgttccgagtaaccatcaacccc

SEQ ID NO: 1772 - protein, 158 aa, Artificial Sequence
  Synthetic
VFTLEDFVGDWEQTAAYNLDQVLEQGGVSSLFQNLAVSVTPIQRIVLSGENALKIDIHVIIPYEGLSADQMAQIEKIFKVVYPVDDHHFKVILHYGTLVIDGVTPNMIDYFGRPYEGIAVFDGKKITVTGTLWNGNKIIDERLINPDGSLLFRVTINP

SEQ ID NO: 1773 - DNA, 474 bp, Artificial Sequence
  Synthetic
gtcttcacactcgaagatttcgttggggactggcgacagacagccgcctacaacctggaccaagtccttgaacagggaggtgtgtccagtttgtttcagaatctcgccgtgtccgtaactccgatccaaaggattgtcctgagcggtgaaaatgccctgaagatcgacatccatgtcatcatcccgtatgaaggtctgagcgccgaccaaatggcccagatcgaaaaaatttttaaggtggtgtaccctgtggatgatcatcactttaaggtgatcctgcactatggcacactggtaatcgacggggttacgccgaacatgatcaactatttcggacggccgtatgaaggcatcgccgtgttcgacggcaaaaagatcactgtaacagggaccctgtggaacggcaacaaaattatcgacgagcgcctgatcacccccgacggctccctgctgttccgagtaaccatcaacgtt

SEQ ID NO: 1774 - protein, 158 aa, Artificial Sequence
  Synthetic
VFTLEDFVGDWRQTAAYNLDQVLEQGGVSSLFQNLAVSVTPIQRIVLSGENALKIDIHVIIPYEGLSADQMAQIEKIFKVVYPVDDHHFKVILHYGTLVIDGVTPNMINYFGRPYEGIAVFDGKKITVTGTLWNGNKIIDERLITPDGSLLFRVTINV

SEQ ID NO: 1775 - DNA, 474 bp, Artificial Sequence
  Synthetic
gtcttcacactcgaagatttcgttggggactggcgacagacagccgcctacaacctggaccaagtccttgaacagggaggtgtgtccagtttgtttcagaatctcgccgtgtccgtaactccgatccaaaggattgtcctgagcggtgaaaatgccctgaagatcgacatccatgtcatcatcccgtatgaaggtctgagcgccgaccaaatggcccagatcgaaaaaatttttaaggtggtgtaccctgtggatgatcatcactttaaggtgatcctgcactatggcacactggtaatcgacggggttacgccgaacatgatcgactatttcggacggccgtatgaaggcatcgccgtgttcgacggcaaaaagatcactgtaacagggaccctgtggaacggcaacaaaattatcgacgagcgcctgatcaaccccgacggctccatgctgttccgagtaaccatcaacgac

SEQ ID NO: 1776 - protein, 158 aa, Artificial Sequence
  Synthetic
VFTLEDFVGDWRQTAAYNLDQVLEQGGVSSLFQNLAVSVTPIQRIVLSGENALKIDIHVIIPYEGLSADQMAQIEKIFKVVYPVDDHHFKVILHYGTLVIDGVTPNMIDYFGRPYEGIAVFDGKKITVTGTLWNGNKIIDERLINPDGSMLFRVTIND

SEQ ID NO: 1777 - DNA, 474 bp, Artificial Sequence
  Synthetic
gtcttcacactcgaagatttcgttggggactggcgacagacagccgcctacaacctggaccaagtccttgaacagggaggtgtgtccagtttgtttcagaatctcgccgtgtccgtaactccgatccaaaggattgtcctgagcggtgaaaatgccctgaagatcgacatccatgtcatcatcccgtatgaaggtctgagcgccgaccaaatggcccagatcgaaaaaatttttaaggtggtgtaccctgtggatgatcatcactttaaggtgatcctgcactatggcacactggtaatcgacggggttacgccgaacatgatcgactatttcggacggccgtatgaaggcatcgccgtgttcgacggcaaaaagatcactgtaacagggaccctgtggaacggcaacaaaattatcgacgagcgcctgatcaaccccgacggctccatgctgttccgagtaaccatcaacccc

SEQ ID NO: 1778 - protein, 158 aa, Artificial Sequence
  Synthetic
VFTLEDFVGDWRQTAAYNLDQVLEQGGVSSLFQNLAVSVTPIQRIVLSGENALKIDIHVIIPYEGLSADQMAQIEKIFKVVYPVDDHHFKVILHYGTLVIDGVTPNMIDYFGRPYEGIAVFDGKKITVTGTLWNGNKIIDERLINPDGSMLFRVTINP

SEQ ID NO: 1779 - DNA, 474 bp, Artificial Sequence
  Synthetic
gtcttcacactcgaagatttcgttggggactgggaacagacagccgcctacaacctggaccaagtccttgaacagggaggtgtgtccagtttgtttcagaatctcgccgtgtccgtaactccgatccaaaggattgtcctgagcggtgaaaatgccctgaagatcgacatccatgtcatcatcccgtatgaaggtctgagcgccgaccaaatggcccagatcgaaaaaatttttaaggtggtgtaccctgtggatgatcatcactttaaggtgatcctgcactatggcacactggtaatcgacggggttacgccgaacatgatcgactatttcggacggccgtatgaaggcatcgccgtgttcgacggcaaaaagatcactgtaacagggaccctgtggaacggcaacaaaattatcgacgagcgcctgatcaaccccgacggctccatgctgttccgagtaaccatcaacccc

SEQ ID NO: 1780 - protein, 158 aa, Artificial Sequence
  Synthetic
VFTLEDFVGDWEQTAAYNLDQVLEQGGVSSLFQNLAVSVTPIQRIVLSGENALKIDIHVIIPYEGLSADQMAQIEKIFKVVYPVDDHHFKVILHYGTLVIDGVTPNMIDYFGRPYEGIAVFDGKKITVTGTLWNGNKIIDERLINPDGSMLFRVTINP

SEQ ID NO: 1781 - DNA, 474 bp, Artificial Sequence
  Synthetic
gtcttcacactcgaagatttcgttggggactgggaacagacagccgcctacaacctggaccaagtccttgaacagggaggtgtgtccagtttgtttcagaatctcgccgtgtccgtaactccgatccaaaggattgtcctgagcggtgaaaatgccctgaagatcgacatccatgtcatcatcccgtatgaaggtctgagcgccgaccaaatggcccagatcgaaaaaatttttaaggtggtgtaccctgtggatgatcatcactttaaggtgatcctgcactatggcacactggtaatcgacggggttacgccgaacatgatcaactatttcggacggccgtatgaaggcatcgccgtgttcgacggcaaaaagatcactgtaacagggaccctgtggaacggcaacaaaattatcgacgagcgcctgatcaaccccgacggctccatgctgttccgagtaaccatcaacccc

SEQ ID NO: 1782 - protein, 158 aa, Artificial Sequence
  Synthetic
VFTLEDFVGDWEQTAAYNLDQVLEQGGVSSLFQNLAVSVTPIQRIVLSGENALKIDIHVIIPYEGLSADQMAQIEKIFKVVYPVDDHHFKVILHYGTLVIDGVTPNMINYFGRPYEGIAVFDGKKITVTGTLWNGNKIIDERLINPDGSMLFRVTINP

SEQ ID NO: 1783 - DNA, 474 bp, Artificial Sequence
  Synthetic
gtcttcacactcgaagatttcgttggggactgggaacagacagccgcctacaacctggaccaagtccttgaacagggaggtgtgtccagtttgtttcagaatctcgccgtgtccgtaactccgatccaaaggattgtcctgagcggtgaaaatgccctgaagatcgacatccatgtcatcatcccgtatgaaggtctgagcgccgaccaaatggcccagatcgaaaaaatttttaaggtggtgtaccctgtggatgatcatcactttaaggtgatcctgcactatggcacactggtaatcgacggggttacgccgaacatgatcgactatttcggacggccgtatgaaggcatcgccgtgttcgacggcaaaaagatcactgtaacagggaccctgtggaacggcaacaaaattatcgacgagcgcctgatcacccccgacggctccatgctgttccgagtaaccatcaacccc

SEQ ID NO: 1784 - protein, 158 aa, Artificial Sequence
  Synthetic
VFTLEDFVGDWEQTAAYNLDQVLEQGGVSSLFQNLAVSVTPIQRIVLSGENALKIDIHVIIPYEGLSADQMAQIEKIFKVVYPVDDHHFKVILHYGTLVIDGVTPNMIDYFGRPYEGIAVFDGKKITVTGTLWNGNKIIDERLITPDGSMLFRVTINP

SEQ ID NO: 1785 - DNA, 474 bp, Artificial Sequence
  Synthetic
gtcttcacactcgaagatttcgttggggactgggaacagacagccgcctacaacctggaccaagtccttgaacagggaggtgtgtccagtttgtttcagaatctcgccgtgtccgtaactccgatccaaaggattgtcctgagcggtgaaaatgccctgaagatcgacatccatgtcatcatcccgtatgaaggtctgagcgccgaccaaatggcccagatcgaaaaaatttttaaggtggtgtaccctgtggatgatcatcactttaaggtgatcctgcactatggcacactggtaatcgacggggttacgccgaacatgatcgactatttcggacggccgtatgaaggcatcgccgtgttcgacggcaaaaagatcactgtaacagggaccctgtggaacggcaacaaaattatcgacgagcgcctgatcaaccccgacggctccatgctgttccgagtaaccatcaacgag

SEQ ID NO: 1786 - protein, 158 aa, Artificial Sequence
  Synthetic
VFTLEDFVGDWEQTAAYNLDQVLEQGGVSSLFQNLAVSVTPIQRIVLSGENALKIDIHVIIPYEGLSADQMAQIEKIFKVVYPVDDHHFKVILHYGTLVIDGVTPNMIDYFGRPYEGIAVFDGKKITVTGTLWNGNKIIDERLINPDGSMLFRVTINE

SEQ ID NO: 1787 - DNA, 474 bp, Artificial Sequence
  Synthetic
gtcttcacactcgaagatttcgttggggactgggaacagacagccgcctacaacctggaccaagtccttgaacagggaggtgtgtccagtttgtttcagaatctcgccgtgtccgtaactccgatccaaaggattgtcctgagcggtgaaaatgccctgaagatcgacatccatgtcatcatcccgtatgaaggtctgagcgccgaccaaatggcccagatcgaaaaaatttttaaggtggtgtaccctgtggatgatcatcactttaaggtgatcctgcactatggcacactggtaatcgacggggttacgccgaacatgatcaactatttcggacggccgtatgaaggcatcgccgtgttcgacggcaaaaagatcactgtaacagggaccctgtggaacggcaacaaaattatcgacgagcgcctgatcaaccccgacggctccatgctgttccgagtaaccatcaacgag

SEQ ID NO: 1788 - protein, 158 aa, Artificial Sequence
  Synthetic
VFTLEDFVGDWEQTAAYNLDQVLEQGGVSSLFQNLAVSVTPIQRIVLSGENALKIDIHVIIPYEGLSADQMAQIEKIFKVVYPVDDHHFKVILHYGTLVIDGVTPNMINYFGRPYEGIAVFDGKKITVTGTLWNGNKIIDERLINPDGSMLFRVTINE

SEQ ID NO: 1789 - DNA, 474 bp, Artificial Sequence
  Synthetic
gtcttcacactcgaagatttcgttggggactgggaacagacagccgcctacaacctggaccaagtccttgaacagggaggtgtgtccagtttgtttcagaatctcgccgtgtccgtaactccgatccaaaggattgtcctgagcggtgaaaatgccctgaagatcgacatccatgtcatcatcccgtatgaaggtctgagcgccgaccaaatggcccagatcgaaaaaatttttaaggtggtgtaccctgtggatgatcatcactttaaggtgatcctgcactatggcacactggtaatcgacggggttacgccgaacatgatcgactatttcggacggccgtatgaaggcatcgccgtgttcgacggcaaaaagatcactgtaacagggaccctgtggaacggcaacaaaattatcgacgagcgcctgatcacccccgacggctccatgctgttccgagtaaccatcaacgag

SEQ ID NO: 1790 - protein, 158 aa, Artificial Sequence
  Synthetic
VFTLEDFVGDWEQTAAYNLDQVLEQGGVSSLFQNLAVSVTPIQRIVLSGENALKIDIHVIIPYEGLSADQMAQIEKIFKVVYPVDDHHFKVILHYGTLVIDGVTPNMIDYFGRPYEGIAVFDGKKITVTGTLWNGNKIIDERLITPDGSMLFRVTINE

SEQ ID NO: 1791 - DNA, 474 bp, Artificial Sequence
  Synthetic
gtcttcacactcgaagatttcgttggggactgggaacagacagccgcctacaacctggaccaagtccttgaacagggaggtgtgtccagtttgtttcagaatctcgccgtgtccgtaactccgatccaaaggattgtcctgagcggtgaaaatgccctgaagatcgacatccatgtcatcatcccgtatgaaggtctgagcgccgaccaaatggcccagatcgaaaaaatttttaaggtggtgtaccctgtggatgatcatcactttaaggtgatcctgcactatggcacactggtaatcgacggggttacgccgaacatgatcaactatttcggacggccgtatgaaggcatcgccgtgttcgacggcaaaaagatcactgtaacagggaccctgtggaacggcaacaaaattatcgacgagcgcctgatcacccccgacggctccatgctgttccgagtaaccatcaacccc

SEQ ID NO: 1792 - protein, 158 aa, Artificial Sequence
  Synthetic
VFTLEDFVGDWEQTAAYNLDQVLEQGGVSSLFQNLAVSVTPIQRIVLSGENALKIDIHVIIPYEGLSADQMAQIEKIFKVVYPVDDHHFKVILHYGTLVIDGVTPNMINYFGRPYEGIAVFDGKKITVTGTLWNGNKIIDERLITPDGSMLFRVTINP

SEQ ID NO: 1793 - DNA, 474 bp, Artificial Sequence
  Synthetic
gtcttcacactcgaagatttcgttggggactgggaacagacagccgcctacaacctggaccaagtccttgaacagggaggtgtgtccagtttgtttcagaatctcgccgtgtccgtaactccgatccaaaggattgtcctgagcggtgaaaatgccctgaagatcgacaaccatgtcatcatcccgtatgaaggtctgagcgccgaccaaatggcccagatcgaaaaaatttttaaggtggtgtaccctgtggatgatcatcactttaaggtgatcctgcactatggcacactggtaatcgacggggttacgccgaacatgatcaactatttcggacggccgtatgaaggcatcgccgtgttcgacggcaaaaagatcactgtaacagggaccctgtggaacggcaacaaaattatcgacgagcgcctgatcacccccgacggctccatgctgttccgagtaaccatcaacccc

SEQ ID NO: 1794 - protein, 158 aa, Artificial Sequence
  Synthetic
VFTLEDFVGDWEQTAAYNLDQVLEQGGVSSLFQNLAVSVTPIQRIVLSGENALKIDNHVIIPYEGLSADQMAQIEKIFKVVYPVDDHHFKVILHYGTLVIDGVTPNMINYFGRPYEGIAVFDGKKITVTGTLWNGNKIIDERLITPDGSMLFRVTINP

SEQ ID NO: 1795 - DNA, 474 bp, Artificial Sequence
  Synthetic
gtcttcacactcgaagatttcgttggggactgggaacagacagccgcctacaacctggaccaagtccttgaacagggaggtgtgtccagtttgtttcagaatctcgccgtgtccgtaactccgatccaaaggattgtcctgagcggtgaaaatgccctgaagatcgacatccatgtcatcatcccgtatgaaggtctgagcgccgaccaaatggcccagatcgaaaaaatttttaaggtggtgtaccctgtggatgatcatcactttaaggtgatcctgcactatggcacactggtaatcgacggggttacgccgaacatgatcaactatttcggacggccgtatgaaggcatcgccgtgttcgacggcaaaaagatcactgtaacagggaccctgtggaacggcaacaaaattatcgacgagcgcctgatcacccccgacggctccatgctgttccgagtaaccatcaacgag

SEQ ID NO: 1796 - protein, 158 aa, Artificial Sequence
  Synthetic
VFTLEDFVGDWEQTAAYNLDQVLEQGGVSSLFQNLAVSVTPIQRIVLSGENALKIDIHVIIPYEGLSADQMAQIEKIFKVVYPVDDHHFKVILHYGTLVIDGVTPNMINYFGRPYEGIAVFDGKKITVTGTLWNGNKIIDERLITPDGSMLFRVTINE

SEQ ID NO: 1797 - DNA, 474 bp, Artificial Sequence
  Synthetic
gtcttcacactcgaagatttcgttggggactgggaacagacagccgcctacaacctggaccaagtccttgaacagggaggtgtgtccagtttgtttcagaatctcgccgtgtccgtaactccgatccaaaggattgtcctgagcggtgaaaatgccctgaagatcgacaaccatgtcatcatcccgtatgaaggtctgagcgccgaccaaatggcccagatcgaaaaaatttttaaggtggtgtaccctgtggatgatcatcactttaaggtgatcctgcactatggcacactggtaatcgacggggttacgccgaacatgatcaactatttcggacggccgtatgaaggcatcgccgtgttcgacggcaaaaagatcactgtaacagggaccctgtggaacggcaacaaaattatcgacgagcgcctgatcacccccgacggctccatgctgttccgagtaaccatcaacgag

SEQ ID NO: 1798 - protein, 158 aa, Artificial Sequence
  Synthetic
VFTLEDFVGDWEQTAAYNLDQVLEQGGVSSLFQNLAVSVTPIQRIVLSGENALKIDNHVIIPYEGLSADQMAQIEKIFKVVYPVDDHHFKVILHYGTLVIDGVTPNMINYFGRPYEGIAVFDGKKITVTGTLWNGNKIIDERLITPDGSMLFRVTINE

SEQ ID NO: 1799 - DNA, 474 bp, Artificial Sequence
  Synthetic
gtcttcacactcgaagatttcgttggggactggcaacagacagccagctacaaccaggaccaagtccttgaacagggaggtgtgtccagtttgatacagaatctcgccgtgtccgtaactccgatccaaaggattgtcctgagcggtgaaaatgccctgaagatcgacatccatgccatcatcccgtatgaaggtctgagcgacgaccaaatggcccagatcgaaaaaatttttaaggtggtgtaccctgtggatgatcatcactttaaggtgatcctgcactatggcacactggtaatcgacggggttacgccgaacgtgatcgactatttcggacggccgtatgaaggcatcgccgtgttcgacggcaaaaagatcactgtaacagggaccctgtggaacggcaacaaaattatcgacgagcgcctgatcaaccccgacggctccatgctgttccgagtaaccatcaacgac

SEQ ID NO: 1800 - protein, 158 aa, Artificial Sequence
  Synthetic
VFTLEDFVGDWNQTASYNQDQVLEQGGVSSLIQNLAVSVTPIQRIVLSGENALKIDIHAIIPYEGLSDDQMAQIEKIFKVVYPVDDHHFKVILHYGTLVIDGVTPNVIDYFGRPYEGIAVFDGKKITVTGTLWNGNKIIDERLINPDGSMLFRVTIND

SEQ ID NO: 1801 - DNA, 474 bp, Artificial Sequence
  Synthetic
gtcttcacactcgaagatttcgttggggactggcgacagacagccagctacaaccaggaccaagtccttgaacagggaggtgtgtccagtttgatacagaatctcgccgtgtccgtaactccgatccaaaggattgtcctgagcggtgaaaatgccctgaagatcgacatccatgccatcatcccgtatgaaggtctgagcgacgaccaaatggcccagatcgaaaaaatttttaaggtggtgtaccctgtggatgatcatcactttaaggtgatcctgcactatggcacactggtaatcgacggggttacgccgaacgtgatcgactatttcggacggccgtatgaaggcatcgccgtgttcgacggcaaaaagatcactgtaacagggaccctgtggaacggcaacaaaattatcgacgagcgcctgatcaaccccgacggctccatgctgttccgagtaaccatcaacgac

SEQ ID NO: 1802 - protein, 158 aa, Artificial Sequence
  Synthetic
VFTLEDFVGDWRQTASYNQDQVLEQGGVSSLIQNLAVSVTPIQRIVLSGENALKIDIHAIIPYEGLSDDQMAQIEKIFKVVYPVDDHHFKVILHYGTLVIDGVTPNVIDYFGRPYEGIAVFDGKKITVTGTLWNGNKIIDERLINPDGSMLFRVTIND

SEQ ID NO: 1803 - DNA, 474 bp, Artificial Sequence
  Synthetic
gtcttcacactcgaagatttcgttggggactggcaacagacagccgcctacaaccaggaccaagtccttgaacagggaggtgtgtccagtttgatacagaatctcgccgtgtccgtaactccgatccaaaggattgtcctgagcggtgaaaatgccctgaagatcgacatccatgccatcatcccgtatgaaggtctgagcgacgaccaaatggcccagatcgaaaaaatttttaaggtggtgtaccctgtggatgatcatcactttaaggtgatcctgcactatggcacactggtaatcgacggggttacgccgaacgtgatcgactatttcggacggccgtatgaaggcatcgccgtgttcgacggcaaaaagatcactgtaacagggaccctgtggaacggcaacaaaattatcgacgagcgcctgatcaaccccgacggctccatgctgttccgagtaaccatcaacgac

SEQ ID NO: 1804 - protein, 158 aa, Artificial Sequence
  Synthetic
VFTLEDFVGDWNQTAAYNQDQVLEQGGVSSLIQNLAVSVTPIQRIVLSGENALKIDIHAIIPYEGLSDDQMAQIEKIFKVVYPVDDHHFKVILHYGTLVIDGVTPNVIDYFGRPYEGIAVFDGKKITVTGTLWNGNKIIDERLINPDGSMLFRVTIND

SEQ ID NO: 1805 - DNA, 474 bp, Artificial Sequence
  Synthetic
gtcttcacactcgaagatttcgttggggactggcaacagacagccagctacaacctggaccaagtccttgaacagggaggtgtgtccagtttgatacagaatctcgccgtgtccgtaactccgatccaaaggattgtcctgagcggtgaaaatgccctgaagatcgacatccatgccatcatcccgtatgaaggtctgagcgacgaccaaatggcccagatcgaaaaaatttttaaggtggtgtaccctgtggatgatcatcactttaaggtgatcctgcactatggcacactggtaatcgacggggttacgccgaacgtgatcgactatttcggacggccgtatgaaggcatcgccgtgttcgacggcaaaaagatcactgtaacagggaccctgtggaacggcaacaaaattatcgacgagcgcctgatcaaccccgacggctccatgctgttccgagtaaccatcaacgac

SEQ ID NO: 1806 - protein, 158 aa, Artificial Sequence
  Synthetic
VFTLEDFVGDWNQTASYNLDQVLEQGGVSSLIQNLAVSVTPIQRIVLSGENALKIDIHAIIPYEGLSDDQMAQIEKIFKVVYPVDDHHFKVILHYGTLVIDGVTPNVIDYFGRPYEGIAVFDGKKITVTGTLWNGNKIIDERLINPDGSMLFRVTIND

SEQ ID NO: 1807 - DNA, 474 bp, Artificial Sequence
  Synthetic
gtcttcacactcgaagatttcgttggggactggcaacagacagccagctacaaccaggaccaagtccttgaacagggaggtgtgtccagtttgtttcagaatctcgccgtgtccgtaactccgatccaaaggattgtcctgagcggtgaaaatgccctgaagatcgacatccatgccatcatcccgtatgaaggtctgagcgacgaccaaatggcccagatcgaaaaaatttttaaggtggtgtaccctgtggatgatcatcactttaaggtgatcctgcactatggcacactggtaatcgacggggttacgccgaacgtgatcgactatttcggacggccgtatgaaggcatcgccgtgttcgacggcaaaaagatcactgtaacagggaccctgtggaacggcaacaaaattatcgacgagcgcctgatcaaccccgacggctccatgctgttccgagtaaccatcaacgac

SEQ ID NO: 1808 - protein, 158 aa, Artificial Sequence
  Synthetic
VFTLEDFVGDWNQTASYNQDQVLEQGGVSSLFQNLAVSVTPIQRIVLSGENALKIDIHAIIPYEGLSDDQMAQIEKIFKVVYPVDDHHFKVILHYGTLVIDGVTPNVIDYFGRPYEGIAVFDGKKITVTGTLWNGNKIIDERLINPDGSMLFRVTIND

SEQ ID NO: 1809 - DNA, 474 bp, Artificial Sequence
  Synthetic
gtcttcacactcgaagatttcgttggggactggcaacagacagccagctacaaccaggaccaagtccttgaacagggaggtgtgtccagtttgatacagaatctcgccgtgtccgtaactccgatccaaaggattgtcctgagcggtgaaaatgccctgaagatcgacatccatgtcatcatcccgtatgaaggtctgagcgacgaccaaatggcccagatcgaaaaaatttttaaggtggtgtaccctgtggatgatcatcactttaaggtgatcctgcactatggcacactggtaatcgacggggttacgccgaacgtgatcgactatttcggacggccgtatgaaggcatcgccgtgttcgacggcaaaaagatcactgtaacagggaccctgtggaacggcaacaaaattatcgacgagcgcctgatcaaccccgacggctccatgctgttccgagtaaccatcaacgac

SEQ ID NO: 1810 - protein, 158 aa, Artificial Sequence
  Synthetic
VFTLEDFVGDWNQTASYNQDQVLEQGGVSSLIQNLAVSVTPIQRIVLSGENALKIDIHVIIPYEGLSDDQMAQIEKIFKVVYPVDDHHFKVILHYGTLVIDGVTPNVIDYFGRPYEGIAVFDGKKITVTGTLWNGNKIIDERLINPDGSMLFRVTIND

SEQ ID NO: 1811 - DNA, 474 bp, Artificial Sequence
  Synthetic
gtcttcacactcgaagatttcgttggggactggcaacagacagccagctacaaccaggaccaagtccttgaacagggaggtgtgtccagtttgatacagaatctcgccgtgtccgtaactccgatccaaaggattgtcctgagcggtgaaaatgccctgaagatcgacatccatgccatcatcccgtatgaaggtctgagcgccgaccaaatggcccagatcgaaaaaatttttaaggtggtgtaccctgtggatgatcatcactttaaggtgatcctgcactatggcacactggtaatcgacggggttacgccgaacgtgatcgactatttcggacggccgtatgaaggcatcgccgtgttcgacggcaaaaagatcactgtaacagggaccctgtggaacggcaacaaaattatcgacgagcgcctgatcaaccccgacggctccatgctgttccgagtaaccatcaacgac

SEQ ID NO: 1812 - protein, 158 aa, Artificial Sequence
  Synthetic
VFTLEDFVGDWNQTASYNQDQVLEQGGVSSLIQNLAVSVTPIQRIVLSGENALKIDIHAIIPYEGLSADQMAQIEKIFKVVYPVDDHHFKVILHYGTLVIDGVTPNVIDYFGRPYEGIAVFDGKKITVTGTLWNGNKIIDERLINPDGSMLFRVTIND

SEQ ID NO: 1813 - DNA, 474 bp, Artificial Sequence
  Synthetic
gtcttcacactcgaagatttcgttggggactggcaacagacagccagctacaaccaggaccaagtccttgaacagggaggtgtgtccagtttgatacagaatctcgccgtgtccgtaactccgatccaaaggattgtcctgagcggtgaaaatgccctgaagatcgacatccatgccatcatcccgtatgaaggtctgagcgacgaccaaatggcccagatcgaaaaaatttttaaggtggtgtaccctgtggatgatcatcactttaaggtgatcctgcactatggcacactggtaatcgacggggttacgccgaacatgatcgactatttcggacggccgtatgaaggcatcgccgtgttcgacggcaaaaagatcactgtaacagggaccctgtggaacggcaacaaaattatcgacgagcgcctgatcaaccccgacggctccatgctgttccgagtaaccatcaacgac

SEQ ID NO: 1814 - protein, 158 aa, Artificial Sequence
  Synthetic
VFTLEDFVGDWNQTASYNQDQVLEQGGVSSLIQNLAVSVTPIQRIVLSGENALKIDIHAIIPYEGLSDDQMAQIEKIFKVVYPVDDHHFKVILHYGTLVIDGVTPNMIDYFGRPYEGIAVFDGKKITVTGTLWNGNKIIDERLINPDGSMLFRVTIND

SEQ ID NO: 1815 - DNA, 474 bp, Artificial Sequence
  Synthetic
gtcttcacactcgaagatttcgttggggactggcaacagacagccagctacaaccaggaccaagtccttgaacagggaggtgtgtccagtttgatacagaatctcgccgtgtccgtaactccgatccaaaggattgtcctgagcggtgaaaatgccctgaagatcgacatccatgccatcatcccgtatgaaggtctgagcgacgaccaaatggcccagatcgaaaaaatttttaaggtggtgtaccctgtggatgatcatcactttaaggtgatcctgcactatggcacactggtaatcgacggggttacgccgaacgtgatcgactatttcggacggccgtatgaaggcatcgccgtgttcgacggcaaaaagatcactgtaacagggaccctgtggaacggcaacaaaattatcgacgagcgcctgatcaaccccgacggctccctgctgttccgagtaaccatcaacgac

SEQ ID NO: 1816 - protein, 158 aa, Artificial Sequence
  Synthetic
VFTLEDFVGDWNQTASYNQDQVLEQGGVSSLIQNLAVSVTPIQRIVLSGENALKIDIHAIIPYEGLSDDQMAQIEKIFKVVYPVDDHHFKVILHYGTLVIDGVTPNVIDYFGRPYEGIAVFDGKKITVTGTLWNGNKIIDERLINPDGSLLFRVTIND

SEQ ID NO: 1817 - DNA, 474 bp, Artificial Sequence
  Synthetic
gtcttcacactcgaagatttcgttggggactggcaacagacagccagctacaaccaggaccaagtccttgaacagggaggtgtgtccagtttgatacagaatctcgccgtgtccgtaactccgatccaaaggattgtcctgagcggtgaaaatgccctgaagatcgacatccatgccatcatcccgtatgaaggtctgagcgacgaccaaatggcccagatcgaaaaaatttttaaggtggtgtaccctgtggatgatcatcactttaaggtgatcctgcactatggcacactggtaatcgacggggttacgccgaacgtgatcgactatttcggacggccgtatgaaggcatcgccgtgttcgacggcaaaaagatcactgtaacagggaccctgtggaacggcaacaaaattatcgacgagcgcctgatcaaccccgacggctccatgctgttccgagtaaccatcaacgtt

SEQ ID NO: 1818 - protein, 158 aa, Artificial Sequence
  Synthetic
VFTLEDFVGDWNQTASYNQDQVLEQGGVSSLIQNLAVSVTPIQRIVLSGENALKIDIHAIIPYEGLSDDQMAQIEKIFKVVYPVDDHHFKVILHYGTLVIDGVTPNVIDYFGRPYEGIAVFDGKKITVTGTLWNGNKIIDERLINPDGSMLFRVTINV

SEQ ID NO: 1819 - DNA, 474 bp, Artificial Sequence
  Synthetic
gtcttcacactcgaagatttcgttggggactggcgacagacagccagctacaaccaggaccaagtccttgaacagggaggtgtgtccagtttgtttcagaatctcgccgtgtccgtaactccgatccaaaggattgtcctgagcggtgaaaatgccctgaagatcgacatccatgtcatcatcccgtatgaaggtctgagcgccgaccaaatggcccagatcgaaaaaatttttaaggtggtgtaccctgtggatgatcatcactttaaggtgatcctgcactatggcacactggtaatcgacggggttacgccgaacgtgatcgactatttcggacggccgtatgaaggcatcgccgtgttcgacggcaaaaagatcactgtaacagggaccctgtggaacggcaacaaaattatcgacgagcgcctgatcaaccccgacggctccatgctgttccgagtaaccatcaacgac

SEQ ID NO: 1820 - protein, 158 aa, Artificial Sequence
  Synthetic
VFTLEDFVGDWRQTASYNQDQVLEQGGVSSLFQNLAVSVTPIQRIVLSGENALKIDIHVIIPYEGLSADQMAQIEKIFKVVYPVDDHHFKVILHYGTLVIDGVTPNVIDYFGRPYEGIAVFDGKKITVTGTLWNGNKIIDERLINPDGSMLFRVTIND

SEQ ID NO: 1821 - DNA, 474 bp, Artificial Sequence
  Synthetic
gtcttcacactcgaagatttcgttggggactggcgacagacagccagctacaaccaggaccaagtccttgaacagggaggtgtgtccagtttgtttcagaatctcgccgtgtccgtaactccgatccaaaggattgtcctgagcggtgaaaatgccctgaagatcgacatccatgtcatcatcccgtatgaaggtctgagcgacgaccaaatggcccagatcgaaaaaatttttaaggtggtgtaccctgtggatgatcatcactttaaggtgatcctgcactatggcacactggtaatcgacggggttacgccgaacgtgatcgactatttcggacggccgtatgaaggcatcgccgtgttcgacggcaaaaagatcactgtaacagggaccctgtggaacggcaacaaaattatcgacgagcgcctgatcaaccccgacggctccatgctgttccgagtaaccatcaacgac

SEQ ID NO: 1822 - protein, 158 aa, Artificial Sequence
  Synthetic
VFTLEDFVGDWRQTASYNQDQVLEQGGVSSLFQNLAVSVTPIQRIVLSGENALKIDIHVIIPYEGLSDDQMAQIEKIFKVVYPVDDHHFKVILHYGTLVIDGVTPNVIDYFGRPYEGIAVFDGKKITVTGTLWNGNKIIDERLINPDGSMLFRVTIND

SEQ ID NO: 1823 - DNA, 474 bp, Artificial Sequence
  Synthetic
gtcttcacactcgaagatttcgttggggactggcaacagacagccagctacaaccaggaccaagtccttgaacagggaggtgtgtccagtttgtttcagaatctcgccgtgtccgtaactccgatccaaaggattgtcctgagcggtgaaaatgccctgaagatcgacatccatgtcatcatcccgtatgaaggtctgagcgccgaccaaatggcccagatcgaaaaaatttttaaggtggtgtaccctgtggatgatcatcactttaaggtgatcctgcactatggcacactggtaatcgacggggttacgccgaacgtgatcgactatttcggacggccgtatgaaggcatcgccgtgttcgacggcaaaaagatcactgtaacagggaccctgtggaacggcaacaaaattatcgacgagcgcctgatcaaccccgacggctccatgctgttccgagtaaccatcaacgac

SEQ ID NO: 1824 - protein, 158 aa, Artificial Sequence
  Synthetic
VFTLEDFVGDWNQTASYNQDQVLEQGGVSSLFQNLAVSVTPIQRIVLSGENALKIDIHVIIPYEGLSADQMAQIEKIFKVVYPVDDHHFKVILHYGTLVIDGVTPNVIDYFGRPYEGIAVFDGKKITVTGTLWNGNKIIDERLINPDGSMLFRVTIND

SEQ ID NO: 1825 - DNA, 477 bp, Artificial Sequence
  Synthetic
gtcttcacactcgaagatttcgttggggactgggaacagacagccgcctacaacctggaccaagtccttgaacagggaggtgtgtccagtttgtttcagaatctcgccgtgtccgtaactccgatccaaaggattgtcctgagcggtgaaaatgccctgaagatcgacatccatgtcatcatcccgtatgaaggtctgagcgccgaccaaatggcccagatcgaaaaaatttttaaggtggtgtaccctgtggatgatcatcactttaaggtgatcctgcactatggcacactggtaatcgacggggttacgccgaacatgatcaactatttcggacggccgtatgaaggcatcgccgtgttcgacggcaaaaagatcactgtaacagggaccctgtggaacggcaacaaaattatcgacgagcgcctgatcacccccgacggctccatgctgttccgagtaaccatcaaccccgtg

SEQ ID NO: 1826 - protein, 159 aa, Artificial Sequence
  Synthetic
VFTLEDFVGDWEQTAAYNLDQVLEQGGVSSLFQNLAVSVTPIQRIVLSGENALKIDIHVIIPYEGLSADQMAQIEKIFKVVYPVDDHHFKVILHYGTLVIDGVTPNMINYFGRPYEGIAVFDGKKITVTGTLWNGNKIIDERLITPDGSMLFRVTINPV

SEQ ID NO: 1827 - DNA, 477 bp, Artificial Sequence
  Synthetic
gtcttcacactcgaagatttcgttggggactgggaacagacagccgcctacaacctggaccaagtccttgaacagggaggtgtgtccagtttgtttcagaatctcgccgtgtccgtaactccgatccaaaggattgtcctgagcggtgaaaatgccctgaagatcgacatccatgtcatcatcccgtatgaaggtctgagcgccgaccaaatggcccagatcgaaaaaatttttaaggtggtgtaccctgtggatgatcatcactttaaggtgatcctgcactatggcacactggtaatcgacggggttacgccgaacatgatcaactatttcggacggccgtatgaaggcatcgccgtgttcgacggcaaaaagatcactgtaacagggaccctgtggaacggcaacaaaattatcgacgagcgcctgatcacccccgacggctccatgctgttccgagtaaccatcaaccccgcc

SEQ ID NO: 1828 - protein, 159 aa, Artificial Sequence
  Synthetic
VFTLEDFVGDWEQTAAYNLDQVLEQGGVSSLFQNLAVSVTPIQRIVLSGENALKIDIHVIIPYEGLSADQMAQIEKIFKVVYPVDDHHFKVILHYGTLVIDGVTPNMINYFGRPYEGIAVFDGKKITVTGTLWNGNKIIDERLITPDGSMLFRVTINPA

SEQ ID NO: 1829 - DNA, 480 bp, Artificial Sequence
  Synthetic
gtcttcacactcgaagatttcgttggggactgggaacagacagccgcctacaacctggaccaagtccttgaacagggaggtgtgtccagtttgtttcagaatctcgccgtgtccgtaactccgatccaaaggattgtcctgagcggtgaaaatgccctgaagatcgacatccatgtcatcatcccgtatgaaggtctgagcgccgaccaaatggcccagatcgaaaaaatttttaaggtggtgtaccctgtggatgatcatcactttaaggtgatcctgcactatggcacactggtaatcgacggggttacgccgaacatgatcaactatttcggacggccgtatgaaggcatcgccgtgttcgacggcaaaaagatcactgtaacagggaccctgtggaacggcaacaaaattatcgacgagcgcctgatcacccccgacggctccatgctgttccgagtaaccatcaaccccgtgacc

SEQ ID NO: 1830 - protein, 160 aa, Artificial Sequence
  Synthetic
VFTLEDFVGDWEQTAAYNLDQVLEQGGVSSLFQNLAVSVTPIQRIVLSGENALKIDIHVIIPYEGLSADQMAQIEKIFKVVYPVDDHHFKVILHYGTLVIDGVTPNMINYFGRPYEGIAVFDGKKITVTGTLWNGNKIIDERLITPDGSMLFRVTINPVT

SEQ ID NO: 1831 - DNA, 480 bp, Artificial Sequence
  Synthetic
gtcttcacactcgaagatttcgttggggactgggaacagacagccgcctacaacctggaccaagtccttgaacagggaggtgtgtccagtttgtttcagaatctcgccgtgtccgtaactccgatccaaaggattgtcctgagcggtgaaaatgccctgaagatcgacatccatgtcatcatcccgtatgaaggtctgagcgccgaccaaatggcccagatcgaaaaaatttttaaggtggtgtaccctgtggatgatcatcactttaaggtgatcctgcactatggcacactggtaatcgacggggttacgccgaacatgatcaactatttcggacggccgtatgaaggcatcgccgtgttcgacggcaaaaagatcactgtaacagggaccctgtggaacggcaacaaaattatcgacgagcgcctgatcacccccgacggctccatgctgttccgagtaaccatcaaccccgtggcc

SEQ ID NO: 1832 - protein, 160 aa, Artificial Sequence
  Synthetic
VFTLEDFVGDWEQTAAYNLDQVLEQGGVSSLFQNLAVSVTPIQRIVLSGENALKIDIHVIIPYEGLSADQMAQIEKIFKVVYPVDDHHFKVILHYGTLVIDGVTPNMINYFGRPYEGIAVFDGKKITVTGTLWNGNKIIDERLITPDGSMLFRVTINPVA

SEQ ID NO: 1833 - DNA, 480 bp, Artificial Sequence
  Synthetic
gtcttcacactcgaagatttcgttggggactgggaacagacagccgcctacaacctggaccaagtccttgaacagggaggtgtgtccagtttgtttcagaatctcgccgtgtccgtaactccgatccaaaggattgtcctgagcggtgaaaatgccctgaagatcgacatccatgtcatcatcccgtatgaaggtctgagcgccgaccaaatggcccagatcgaaaaaatttttaaggtggtgtaccctgtggatgatcatcactttaaggtgatcctgcactatggcacactggtaatcgacggggttacgccgaacatgatcaactatttcggacggccgtatgaaggcatcgccgtgttcgacggcaaaaagatcactgtaacagggaccctgtggaacggcaacaaaattatcgacgagcgcctgatcacccccgacggctccatgctgttccgagtaaccatcaaccccgccacc

SEQ ID NO: 1834 - protein, 160 aa, Artificial Sequence
  Synthetic
VFTLEDFVGDWEQTAAYNLDQVLEQGGVSSLFQNLAVSVTPIQRIVLSGENALKIDIHVIIPYEGLSADQMAQIEKIFKVVYPVDDHHFKVILHYGTLVIDGVTPNMINYFGRPYEGIAVFDGKKITVTGTLWNGNKIIDERLITPDGSMLFRVTINPAT

SEQ ID NO: 1835 - DNA, 480 bp, Artificial Sequence
  Synthetic
gtcttcacactcgaagatttcgttggggactgggaacagacagccgcctacaacctggaccaagtccttgaacagggaggtgtgtccagtttgtttcagaatctcgccgtgtccgtaactccgatccaaaggattgtcctgagcggtgaaaatgccctgaagatcgacatccatgtcatcatcccgtatgaaggtctgagcgccgaccaaatggcccagatcgaaaaaatttttaaggtggtgtaccctgtggatgatcatcactttaaggtgatcctgcactatggcacactggtaatcgacggggttacgccgaacatgatcaactatttcggacggccgtatgaaggcatcgccgtgttcgacggcaaaaagatcactgtaacagggaccctgtggaacggcaacaaaattatcgacgagcgcctgatcacccccgacggctccatgctgttccgagtaaccatcaaccccgccgcc

SEQ ID NO: 1836 - protein, 160 aa, Artificial Sequence
  Synthetic
VFTLEDFVGDWEQTAAYNLDQVLEQGGVSSLFQNLAVSVTPIQRIVLSGENALKIDIHVIIPYEGLSADQMAQIEKIFKVVYPVDDHHFKVILHYGTLVIDGVTPNMINYFGRPYEGIAVFDGKKITVTGTLWNGNKIIDERLITPDGSMLFRVTINPAA

SEQ ID NO: 1837 - DNA, 480 bp, Artificial Sequence
  Synthetic
gtcttcacactcgaagatttcgttggggactgggaacagacagccgcctacaacctggaccaagtccttgaacagggaggtgtgtccagtttgtttcagaatctcgccgtgtccgtaactccgatccaaaggattgtcctgagcggtgaaaatgccctgaagatcgacatccatgtcatcatcccgtatgaaggtctgagcgccgaccaaatggcccagatcgaaaaaatttttaaggtggtgtaccctgtggatgatcatcactttaaggtgatcctgcactatggcacactggtaatcgacggggttacgccgaacatgatcaactatttcggacggccgtatgaaggcatcgccgtgttcgacggcaaaaagatcactgtaacagggaccctgtggaacggcaacaaaattatcgacgagcgcctgatcacccccgacggctccatgctgttccgagtaaccatcaaccccggcggc

SEQ ID NO: 1838 - protein, 160 aa, Artificial Sequence
  Synthetic
VFTLEDFVGDWEQTAAYNLDQVLEQGGVSSLFQNLAVSVTPIQRIVLSGENALKIDIHVIIPYEGLSADQMAQIEKIFKVVYPVDDHHFKVILHYGTLVIDGVTPNMINYFGRPYEGIAVFDGKKITVTGTLWNGNKIIDERLITPDGSMLFRVTINPGG

SEQ ID NO: 1839 - DNA, 480 bp, Artificial Sequence
  Synthetic
gtcttcacactcgaagatttcgttggggactgggaacagacagccgcctacaacctggaccaagtccttgaacagggaggtgtgtccagtttgtttcagaatctcgccgtgtccgtaactccgatccaaaggattgtcctgagcggtgaaaatgccctgaagatcgacatccatgtcatcatcccgtatgaaggtctgagcgccgaccaaatggcccagatcgaaaaaatttttaaggtggtgtaccctgtggatgatcatcactttaaggtgatcctgcactatggcacactggtaatcgacggggttacgccgaacatgatcaactatttcggacggccgtatgaaggcatcgccgtgttcgacggcaaaaagatcactgtaacagggaccctgtggaacggcaacaaaattatcgacgagcgcctgatcacccccgacggctccatgctgttccgagtaaccatcaaccccggcacc

SEQ ID NO: 1840 - protein, 160 aa, Artificial Sequence
  Synthetic
VFTLEDFVGDWEQTAAYNLDQVLEQGGVSSLFQNLAVSVTPIQRIVLSGENALKIDIHVIIPYEGLSADQMAQIEKIFKVVYPVDDHHFKVILHYGTLVIDGVTPNMINYFGRPYEGIAVFDGKKITVTGTLWNGNKIIDERLITPDGSMLFRVTINPGT

SEQ ID NO: 1841 - DNA, 483 bp, Artificial Sequence
  Synthetic
gtcttcacactcgaagatttcgttggggactgggaacagacagccgcctacaacctggaccaagtccttgaacagggaggtgtgtccagtttgtttcagaatctcgccgtgtccgtaactccgatccaaaggattgtcctgagcggtgaaaatgccctgaagatcgacatccatgtcatcatcccgtatgaaggtctgagcgccgaccaaatggcccagatcgaaaaaatttttaaggtggtgtaccctgtggatgatcatcactttaaggtgatcctgcactatggcacactggtaatcgacggggttacgccgaacatgatcaactatttcggacggccgtatgaaggcatcgccgtgttcgacggcaaaaagatcactgtaacagggaccctgtggaacggcaacaaaattatcgacgagcgcctgatcacccccgacggctccatgctgttccgagtaaccatcaaccccgccaccggc

SEQ ID NO: 1842 - protein, 161 aa, Artificial Sequence
  Synthetic
VFTLEDFVGDWEQTAAYNLDQVLEQGGVSSLFQNLAVSVTPIQRIVLSGENALKIDIHVIIPYEGLSADQMAQIEKIFKVVYPVDDHHFKVILHYGTLVIDGVTPNMINYFGRPYEGIAVFDGKKITVTGTLWNGNKIIDERLITPDGSMLFRVTINPATG

SEQ ID NO: 1843 - DNA, 483 bp, Artificial Sequence
  Synthetic
gtcttcacactcgaagatttcgttggggactgggaacagacagccgcctacaacctggaccaagtccttgaacagggaggtgtgtccagtttgtttcagaatctcgccgtgtccgtaactccgatccaaaggattgtcctgagcggtgaaaatgccctgaagatcgacatccatgtcatcatcccgtatgaaggtctgagcgccgaccaaatggcccagatcgaaaaaatttttaaggtggtgtaccctgtggatgatcatcactttaaggtgatcctgcactatggcacactggtaatcgacggggttacgccgaacatgatcaactatttcggacggccgtatgaaggcatcgccgtgttcgacggcaaaaagatcactgtaacagggaccctgtggaacggcaacaaaattatcgacgagcgcctgatcacccccgacggctccatgctgttccgagtaaccatcaaccccgtgaccggc

SEQ ID NO: 1844 - protein, 161 aa, Artificial Sequence
  Synthetic
VFTLEDFVGDWEQTAAYNLDQVLEQGGVSSLFQNLAVSVTPIQRIVLSGENALKIDIHVIIPYEGLSADQMAQIEKIFKVVYPVDDHHFKVILHYGTLVIDGVTPNMINYFGRPYEGIAVFDGKKITVTGTLWNGNKIIDERLITPDGSMLFRVTINPVTG

SEQ ID NO: 1845 - DNA, 483 bp, Artificial Sequence
  Synthetic
gtcttcacactcgaagatttcgttggggactgggaacagacagccgcctacaacctggaccaagtccttgaacagggaggtgtgtccagtttgtttcagaatctcgccgtgtccgtaactccgatccaaaggattgtcctgagcggtgaaaatgccctgaagatcgacatccatgtcatcatcccgtatgaaggtctgagcgccgaccaaatggcccagatcgaaaaaatttttaaggtggtgtaccctgtggatgatcatcactttaaggtgatcctgcactatggcacactggtaatcgacggggttacgccgaacatgatcaactatttcggacggccgtatgaaggcatcgccgtgttcgacggcaaaaagatcactgtaacagggaccctgtggaacggcaacaaaattatcgacgagcgcctgatcacccccgacggctccatgctgttccgagtaaccatcaaccccgtgaccgcc

SEQ ID NO: 1846 - protein, 161 aa, Artificial Sequence
  Synthetic
VFTLEDFVGDWEQTAAYNLDQVLEQGGVSSLFQNLAVSVTPIQRIVLSGENALKIDIHVIIPYEGLSADQMAQIEKIFKVVYPVDDHHFKVILHYGTLVIDGVTPNMINYFGRPYEGIAVFDGKKITVTGTLWNGNKIIDERLITPDGSMLFRVTINPVTA

SEQ ID NO: 1847 - DNA, 483 bp, Artificial Sequence
  Synthetic
gtcttcacactcgaagatttcgttggggactgggaacagacagccgcctacaacctggaccaagtccttgaacagggaggtgtgtccagtttgtttcagaatctcgccgtgtccgtaactccgatccaaaggattgtcctgagcggtgaaaatgccctgaagatcgacatccatgtcatcatcccgtatgaaggtctgagcgccgaccaaatggcccagatcgaaaaaatttttaaggtggtgtaccctgtggatgatcatcactttaaggtgatcctgcactatggcacactggtaatcgacggggttacgccgaacatgatcaactatttcggacggccgtatgaaggcatcgccgtgttcgacggcaaaaagatcactgtaacagggaccctgtggaacggcaacaaaattatcgacgagcgcctgatcacccccgacggctccatgctgttccgagtaaccatcaaccccggcaccgcc

SEQ ID NO: 1848 - protein, 161 aa, Artificial Sequence
  Synthetic
VFTLEDFVGDWEQTAAYNLDQVLEQGGVSSLFQNLAVSVTPIQRIVLSGENALKIDIHVIIPYEGLSADQMAQIEKIFKVVYPVDDHHFKVILHYGTLVIDGVTPNMINYFGRPYEGIAVFDGKKITVTGTLWNGNKIIDERLITPDGSMLFRVTINPGTA

SEQ ID NO: 1849 - DNA, 486 bp, Artificial Sequence
  Synthetic
gtcttcacactcgaagatttcgttggggactgggaacagacagccgcctacaacctggaccaagtccttgaacagggaggtgtgtccagtttgtttcagaatctcgccgtgtccgtaactccgatccaaaggattgtcctgagcggtgaaaatgccctgaagatcgacatccatgtcatcatcccgtatgaaggtctgagcgccgaccaaatggcccagatcgaaaaaatttttaaggtggtgtaccctgtggatgatcatcactttaaggtgatcctgcactatggcacactggtaatcgacggggttacgccgaacatgatcaactatttcggacggccgtatgaaggcatcgccgtgttcgacggcaaaaagatcactgtaacagggaccctgtggaacggcaacaaaattatcgacgagcgcctgatcacccccgacggctccatgctgttccgagtaaccatcaaccccgtgaccggctgg

SEQ ID NO: 1850 - protein, 162 aa, Artificial Sequence
  Synthetic
VFTLEDFVGDWEQTAAYNLDQVLEQGGVSSLFQNLAVSVTPIQRIVLSGENALKIDIHVIIPYEGLSADQMAQIEKIFKVVYPVDDHHFKVILHYGTLVIDGVTPNMINYFGRPYEGIAVFDGKKITVTGTLWNGNKIIDERLITPDGSMLFRVTINPVTGW

SEQ ID NO: 1851 - DNA, 489 bp, Artificial Sequence
  Synthetic
gtcttcacactcgaagatttcgttggggactgggaacagacagccgcctacaacctggaccaagtccttgaacagggaggtgtgtccagtttgtttcagaatctcgccgtgtccgtaactccgatccaaaggattgtcctgagcggtgaaaatgccctgaagatcgacatccatgtcatcatcccgtatgaaggtctgagcgccgaccaaatggcccagatcgaaaaaatttttaaggtggtgtaccctgtggatgatcatcactttaaggtgatcctgcactatggcacactggtaatcgacggggttacgccgaacatgatcaactatttcggacggccgtatgaaggcatcgccgtgttcgacggcaaaaagatcactgtaacagggaccctgtggaacggcaacaaaattatcgacgagcgcctgatcacccccgacggctccatgctgttccgagtaaccatcaaccccgtgaccggctggcgg

SEQ ID NO: 1852 - protein, 163 aa, Artificial Sequence
  Synthetic
VFTLEDFVGDWEQTAAYNLDQVLEQGGVSSLFQNLAVSVTPIQRIVLSGENALKIDIHVIIPYEGLSADQMAQIEKIFKVVYPVDDHHFKVILHYGTLVIDGVTPNMINYFGRPYEGIAVFDGKKITVTGTLWNGNKIIDERLITPDGSMLFRVTINPVTGWR

SEQ ID NO: 1853 - DNA, 489 bp, Artificial Sequence
  Synthetic
gtcttcacactcgaagatttcgttggggactgggaacagacagccgcctacaacctggaccaagtccttgaacagggaggtgtgtccagtttgtttcagaatctcgccgtgtccgtaactccgatccaaaggattgtcctgagcggtgaaaatgccctgaagatcgacatccatgtcatcatcccgtatgaaggtctgagcgccgaccaaatggcccagatcgaaaaaatttttaaggtggtgtaccctgtggatgatcatcactttaaggtgatcctgcactatggcacactggtaatcgacggggttacgccgaacatgatcaactatttcggacggccgtatgaaggcatcgccgtgttcgacggcaaaaagatcactgtaacagggaccctgtggaacggcaacaaaattatcgacgagcgcctgatcacccccgacggctccatgctgttccgagtaaccatcaaccccgtgaccggctgggag

SEQ ID NO: 1854 - protein, 163 aa, Artificial Sequence
  Synthetic
VFTLEDFVGDWEQTAAYNLDQVLEQGGVSSLFQNLAVSVTPIQRIVLSGENALKIDIHVIIPYEGLSADQMAQIEKIFKVVYPVDDHHFKVILHYGTLVIDGVTPNMINYFGRPYEGIAVFDGKKITVTGTLWNGNKIIDERLITPDGSMLFRVTINPVTGWE

SEQ ID NO: 1855 - DNA, 489 bp, Artificial Sequence
  Synthetic
gtcttcacactcgaagatttcgttggggactgggaacagacagccgcctacaacctggaccaagtccttgaacagggaggtgtgtccagtttgtttcagaatctcgccgtgtccgtaactccgatccaaaggattgtcctgagcggtgaaaatgccctgaagatcgacatccatgtcatcatcccgtatgaaggtctgagcgccgaccaaatggcccagatcgaaaaaatttttaaggtggtgtaccctgtggatgatcatcactttaaggtgatcctgcactatggcacactggtaatcgacggggttacgccgaacatgatcaactatttcggacggccgtatgaaggcatcgccgtgttcgacggcaaaaagatcactgtaacagggaccctgtggaacggcaacaaaattatcgacgagcgcctgatcacccccgacggctccatgctgttccgagtaaccatcaaccccgtgaccggctggaag

SEQ ID NO: 1856 - protein, 163 aa, Artificial Sequence
  Synthetic
VFTLEDFVGDWEQTAAYNLDQVLEQGGVSSLFQNLAVSVTPIQRIVLSGENALKIDIHVIIPYEGLSADQMAQIEKIFKVVYPVDDHHFKVILHYGTLVIDGVTPNMINYFGRPYEGIAVFDGKKITVTGTLWNGNKIIDERLITPDGSMLFRVTINPVTGWK

SEQ ID NO: 1857 - DNA, 489 bp, Artificial Sequence
  Synthetic
gtcttcacactcgaagatttcgttggggactgggaacagacagccgcctacaacctggaccaagtccttgaacagggaggtgtgtccagtttgtttcagaatctcgccgtgtccgtaactccgatccaaaggattgtcctgagcggtgaaaatgccctgaagatcgacatccatgtcatcatcccgtatgaaggtctgagcgccgaccaaatggcccagatcgaaaaaatttttaaggtggtgtaccctgtggatgatcatcactttaaggtgatcctgcactatggcacactggtaatcgacggggttacgccgaacatgatcaactatttcggacggccgtatgaaggcatcgccgtgttcgacggcaaaaagatcactgtaacagggaccctgtggaacggcaacaaaattatcgacgagcgcctgatcacccccgacggctccatgctgttccgagtaaccatcaaccccgtgaccggctggcag

SEQ ID NO: 1858 - protein, 163 aa, Artificial Sequence
  Synthetic
VFTLEDFVGDWEQTAAYNLDQVLEQGGVSSLFQNLAVSVTPIQRIVLSGENALKIDIHVIIPYEGLSADQMAQIEKIFKVVYPVDDHHFKVILHYGTLVIDGVTPNMINYFGRPYEGIAVFDGKKITVTGTLWNGNKIIDERLITPDGSMLFRVTINPVTGWQ

SEQ ID NO: 1859 - DNA, 489 bp, Artificial Sequence
  Synthetic
gtcttcacactcgaagatttcgttggggactgggaacagacagccgcctacaacctggaccaagtccttgaacagggaggtgtgtccagtttgtttcagaatctcgccgtgtccgtaactccgatccaaaggattgtcctgagcggtgaaaatgccctgaagatcgacatccatgtcatcatcccgtatgaaggtctgagcgccgaccaaatggcccagatcgaaaaaatttttaaggtggtgtaccctgtggatgatcatcactttaaggtgatcctgcactatggcacactggtaatcgacggggttacgccgaacatgatcaactatttcggacggccgtatgaaggcatcgccgtgttcgacggcaaaaagatcactgtaacagggaccctgtggaacggcaacaaaattatcgacgagcgcctgatcacccccgacggctccatgctgttccgagtaaccatcaaccccgtgaccggctggcac

SEQ ID NO: 1860 - protein, 163 aa, Artificial Sequence
  Synthetic
VFTLEDFVGDWEQTAAYNLDQVLEQGGVSSLFQNLAVSVTPIQRIVLSGENALKIDIHVIIPYEGLSADQMAQIEKIFKVVYPVDDHHFKVILHYGTLVIDGVTPNMINYFGRPYEGIAVFDGKKITVTGTLWNGNKIIDERLITPDGSMLFRVTINPVTGWH

SEQ ID NO: 1861 - DNA, 471 bp, Artificial Sequence
  Synthetic
gtcttcacactcgaagatttcgttggggactgggaacagacagccgcctacaacctggaccaagtccttgaacagggaggtgtgtccagtttgtttcagaatctcgccgtgtccgtaactccgatccaaaggattgtcctgagcggtgaaaatgccctgaagatcgacatccatgtcatcatcccgtatgaaggtctgagcgccgaccaaatggcccagatcgaaaaaatttttaaggtggtgtaccctgtggatgatcatcactttaaggtgatcctgcactatggcacactggtaatcgacggggttacgccgaacatgatcaactatttcggacggccgtatgaaggcatcgccgtgttcgacggcaaaaagatcactgtaacagggaccctgtggaacggcaacaaaattatcgacgagcgcctgatcacccccgacggctccatgctgttccgagtaaccatcaac

SEQ ID NO: 1862 - protein, 157 aa, Artificial Sequence
  Synthetic
VFTLEDFVGDWEQTAAYNLDQVLEQGGVSSLFQNLAVSVTPIQRIVLSGENALKIDIHVIIPYEGLSADQMAQIEKIFKVVYPVDDHHFKVILHYGTLVIDGVTPNMINYFGRPYEGIAVFDGKKITVTGTLWNGNKIIDERLITPDGSMLFRVTIN

SEQ ID NO: 1863 - DNA, 468 bp, Artificial Sequence
  Synthetic
gtcttcacactcgaagatttcgttggggactgggaacagacagccgcctacaacctggaccaagtccttgaacagggaggtgtgtccagtttgtttcagaatctcgccgtgtccgtaactccgatccaaaggattgtcctgagcggtgaaaatgccctgaagatcgacatccatgtcatcatcccgtatgaaggtctgagcgccgaccaaatggcccagatcgaaaaaatttttaaggtggtgtaccctgtggatgatcatcactttaaggtgatcctgcactatggcacactggtaatcgacggggttacgccgaacatgatcaactatttcggacggccgtatgaaggcatcgccgtgttcgacggcaaaaagatcactgtaacagggaccctgtggaacggcaacaaaattatcgacgagcgcctgatcacccccgacggctccatgctgttccgagtaaccatc

SEQ ID NO: 1864 - protein, 156 aa, Artificial Sequence
  Synthetic
VFTLEDFVGDWEQTAAYNLDQVLEQGGVSSLFQNLAVSVTPIQRIVLSGENALKIDIHVIIPYEGLSADQMAQIEKIFKVVYPVDDHHFKVILHYGTLVIDGVTPNMINYFGRPYEGIAVFDGKKITVTGTLWNGNKIIDERLITPDGSMLFRVTI

SEQ ID NO: 1865 - DNA, 465 bp, Artificial Sequence
  Synthetic
gtcttcacactcgaagatttcgttggggactgggaacagacagccgcctacaacctggaccaagtccttgaacagggaggtgtgtccagtttgtttcagaatctcgccgtgtccgtaactccgatccaaaggattgtcctgagcggtgaaaatgccctgaagatcgacatccatgtcatcatcccgtatgaaggtctgagcgccgaccaaatggcccagatcgaaaaaatttttaaggtggtgtaccctgtggatgatcatcactttaaggtgatcctgcactatggcacactggtaatcgacggggttacgccgaacatgatcaactatttcggacggccgtatgaaggcatcgccgtgttcgacggcaaaaagatcactgtaacagggaccctgtggaacggcaacaaaattatcgacgagcgcctgatcacccccgacggctccatgctgttccgagtaacc

SEQ ID NO: 1866 - protein, 155 aa, Artificial Sequence
  Synthetic
VFTLEDFVGDWEQTAAYNLDQVLEQGGVSSLFQNLAVSVTPIQRIVLSGENALKIDIHVIIPYEGLSADQMAQIEKIFKVVYPVDDHHFKVILHYGTLVIDGVTPNMINYFGRPYEGIAVFDGKKITVTGTLWNGNKIIDERLITPDGSMLFRVT

SEQ ID NO: 1867 - DNA, 462 bp, Artificial Sequence
  Synthetic
gtcttcacactcgaagatttcgttggggactgggaacagacagccgcctacaacctggaccaagtccttgaacagggaggtgtgtccagtttgtttcagaatctcgccgtgtccgtaactccgatccaaaggattgtcctgagcggtgaaaatgccctgaagatcgacatccatgtcatcatcccgtatgaaggtctgagcgccgaccaaatggcccagatcgaaaaaatttttaaggtggtgtaccctgtggatgatcatcactttaaggtgatcctgcactatggcacactggtaatcgacggggttacgccgaacatgatcaactatttcggacggccgtatgaaggcatcgccgtgttcgacggcaaaaagatcactgtaacagggaccctgtggaacggcaacaaaattatcgacgagcgcctgatcacccccgacggctccatgctgttccgagta

SEQ ID NO: 1868 - protein, 154 aa, Artificial Sequence
  Synthetic
VFTLEDFVGDWEQTAAYNLDQVLEQGGVSSLFQNLAVSVTPIQRIVLSGENALKIDIHVIIPYEGLSADQMAQIEKIFKVVYPVDDHHFKVILHYGTLVIDGVTPNMINYFGRPYEGIAVFDGKKITVTGTLWNGNKIIDERLITPDGSMLFRV

SEQ ID NO: 1869 - DNA, 459 bp, Artificial Sequence
  Synthetic
gtcttcacactcgaagatttcgttggggactgggaacagacagccgcctacaacctggaccaagtccttgaacagggaggtgtgtccagtttgtttcagaatctcgccgtgtccgtaactccgatccaaaggattgtcctgagcggtgaaaatgccctgaagatcgacatccatgtcatcatcccgtatgaaggtctgagcgccgaccaaatggcccagatcgaaaaaatttttaaggtggtgtaccctgtggatgatcatcactttaaggtgatcctgcactatggcacactggtaatcgacggggttacgccgaacatgatcaactatttcggacggccgtatgaaggcatcgccgtgttcgacggcaaaaagatcactgtaacagggaccctgtggaacggcaacaaaattatcgacgagcgcctgatcacccccgacggctccatgctgttccga

SEQ ID NO: 1870 - protein, 153 aa, Artificial Sequence
  Synthetic
VFTLEDFVGDWEQTAAYNLDQVLEQGGVSSLFQNLAVSVTPIQRIVLSGENALKIDIHVIIPYEGLSADQMAQIEKIFKVVYPVDDHHFKVILHYGTLVIDGVTPNMINYFGRPYEGIAVFDGKKITVTGTLWNGNKIIDERLITPDGSMLFR

SEQ ID NO: 1871 - DNA, 456 bp, Artificial Sequence
  Synthetic
gtcttcacactcgaagatttcgttggggactgggaacagacagccgcctacaacctggaccaagtccttgaacagggaggtgtgtccagtttgtttcagaatctcgccgtgtccgtaactccgatccaaaggattgtcctgagcggtgaaaatgccctgaagatcgacatccatgtcatcatcccgtatgaaggtctgagcgccgaccaaatggcccagatcgaaaaaatttttaaggtggtgtaccctgtggatgatcatcactttaaggtgatcctgcactatggcacactggtaatcgacggggttacgccgaacatgatcaactatttcggacggccgtatgaaggcatcgccgtgttcgacggcaaaaagatcactgtaacagggaccctgtggaacggcaacaaaattatcgacgagcgcctgatcacccccgacggctccatgctgttc

SEQ ID NO: 1872 - protein, 152 aa, Artificial Sequence
  Synthetic
VFTLEDFVGDWEQTAAYNLDQVLEQGGVSSLFQNLAVSVTPIQRIVLSGENALKIDIHVIIPYEGLSADQMAQIEKIFKVVYPVDDHHFKVILHYGTLVIDGVTPNMINYFGRPYEGIAVFDGKKITVTGTLWNGNKIIDERLITPDGSMLF

SEQ ID NO: 1873 - DNA, 453 bp, Artificial Sequence
  Synthetic
gtcttcacactcgaagatttcgttggggactgggaacagacagccgcctacaacctggaccaagtccttgaacagggaggtgtgtccagtttgtttcagaatctcgccgtgtccgtaactccgatccaaaggattgtcctgagcggtgaaaatgccctgaagatcgacatccatgtcatcatcccgtatgaaggtctgagcgccgaccaaatggcccagatcgaaaaaatttttaaggtggtgtaccctgtggatgatcatcactttaaggtgatcctgcactatggcacactggtaatcgacggggttacgccgaacatgatcaactatttcggacggccgtatgaaggcatcgccgtgttcgacggcaaaaagatcactgtaacagggaccctgtggaacggcaacaaaattatcgacgagcgcctgatcacccccgacggctccatgctg

SEQ ID NO: 1874 - protein, 151 aa, Artificial Sequence
  Synthetic
VFTLEDFVGDWEQTAAYNLDQVLEQGGVSSLFQNLAVSVTPIQRIVLSGENALKIDIHVIIPYEGLSADQMAQIEKIFKVVYPVDDHHFKVILHYGTLVIDGVTPNMINYFGRPYEGIAVFDGKKITVTGTLWNGNKIIDERLITPDGSML

SEQ ID NO: 1875 - DNA, 474 bp, Artificial Sequence
  Synthetic
gtcttcacactcgaagatttcgttggggactgggaacagacagccgcctacaacctggaccaagtccttgaacagggaggtgtgtccagtttggcccagaatctcgccgtgtccgtaactccgatccaaaggattgtcctgagcggtgaaaatgccctgaagatcgacatccatgtcatcatcccgtatgaaggtctgagcgccgaccaaatggcccagatcgaaaaaatttttaaggtggtgtaccctgtggatgatcatcactttaaggtgatcctgcactatggcacactggtaatcgacggggttacgccgaacatgatcaactatttcggacggccgtatgaaggcatcgccgtgttcgacggcaaaaagatcactgtaacagggaccctgtggaacggcaacaaaattatcgacgagcgcctgatcacccccgacggctccatgctgttccgagtaaccatcaacccc

SEQ ID NO: 1876 - protein, 158 aa, Artificial Sequence
  Synthetic
VFTLEDFVGDWEQTAAYNLDQVLEQGGVSSLAQNLAVSVTPIQRIVLSGENALKIDIHVIIPYEGLSADQMAQIEKIFKVVYPVDDHHFKVILHYGTLVIDGVTPNMINYFGRPYEGIAVFDGKKITVTGTLWNGNKIIDERLITPDGSMLFRVTINP

SEQ ID NO: 1877 - DNA, 474 bp, Artificial Sequence
  Synthetic
gtcttcacactcgaagatttcgttggggactgggaacagacagccgcctacaacctggaccaagtccttgaacagggaggtgtgtccagtttgtgccagaatctcgccgtgtccgtaactccgatccaaaggattgtcctgagcggtgaaaatgccctgaagatcgacatccatgtcatcatcccgtatgaaggtctgagcgccgaccaaatggcccagatcgaaaaaatttttaaggtggtgtaccctgtggatgatcatcactttaaggtgatcctgcactatggcacactggtaatcgacggggttacgccgaacatgatcaactatttcggacggccgtatgaaggcatcgccgtgttcgacggcaaaaagatcactgtaacagggaccctgtggaacggcaacaaaattatcgacgagcgcctgatcacccccgacggctccatgctgttccgagtaaccatcaacccc

SEQ ID NO: 1878 - protein, 158 aa, Artificial Sequence
  Synthetic
VFTLEDFVGDWEQTAAYNLDQVLEQGGVSSLCQNLAVSVTPIQRIVLSGENALKIDIHVIIPYEGLSADQMAQIEKIFKVVYPVDDHHFKVILHYGTLVIDGVTPNMINYFGRPYEGIAVFDGKKITVTGTLWNGNKIIDERLITPDGSMLFRVTINP

SEQ ID NO: 1879 - DNA, 474 bp, Artificial Sequence
  Synthetic
gtcttcacactcgaagatttcgttggggactgggaacagacagccgcctacaacctggaccaagtccttgaacagggaggtgtgtccagtttggaccagaatctcgccgtgtccgtaactccgatccaaaggattgtcctgagcggtgaaaatgccctgaagatcgacatccatgtcatcatcccgtatgaaggtctgagcgccgaccaaatggcccagatcgaaaaaatttttaaggtggtgtaccctgtggatgatcatcactttaaggtgatcctgcactatggcacactggtaatcgacggggttacgccgaacatgatcaactatttcggacggccgtatgaaggcatcgccgtgttcgacggcaaaaagatcactgtaacagggaccctgtggaacggcaacaaaattatcgacgagcgcctgatcacccccgacggctccatgctgttccgagtaaccatcaacccc

SEQ ID NO: 1880 - protein, 158 aa, Artificial Sequence
  Synthetic
VFTLEDFVGDWEQTAAYNLDQVLEQGGVSSLDQNLAVSVTPIQRIVLSGENALKIDIHVIIPYEGLSADQMAQIEKIFKVVYPVDDHHFKVILHYGTLVIDGVTPNMINYFGRPYEGIAVFDGKKITVTGTLWNGNKIIDERLITPDGSMLFRVTINP

SEQ ID NO: 1881 - DNA, 474 bp, Artificial Sequence
  Synthetic
gtcttcacactcgaagatttcgttggggactgggaacagacagccgcctacaacctggaccaagtccttgaacagggaggtgtgtccagtttggagcagaatctcgccgtgtccgtaactccgatccaaaggattgtcctgagcggtgaaaatgccctgaagatcgacatccatgtcatcatcccgtatgaaggtctgagcgccgaccaaatggcccagatcgaaaaaatttttaaggtggtgtaccctgtggatgatcatcactttaaggtgatcctgcactatggcacactggtaatcgacggggttacgccgaacatgatcaactatttcggacggccgtatgaaggcatcgccgtgttcgacggcaaaaagatcactgtaacagggaccctgtggaacggcaacaaaattatcgacgagcgcctgatcacccccgacggctccatgctgttccgagtaaccatcaacccc

SEQ ID NO: 1882 - protein, 158 aa, Artificial Sequence
  Synthetic
VFTLEDFVGDWEQTAAYNLDQVLEQGGVSSLEQNLAVSVTPIQRIVLSGENALKIDIHVIIPYEGLSADQMAQIEKIFKVVYPVDDHHFKVILHYGTLVIDGVTPNMINYFGRPYEGIAVFDGKKITVTGTLWNGNKIIDERLITPDGSMLFRVTINP

SEQ ID NO: 1883 - DNA, 474 bp, Artificial Sequence
  Synthetic
gtcttcacactcgaagatttcgttggggactgggaacagacagccgcctacaacctggaccaagtccttgaacagggaggtgtgtccagtttgggccagaatctcgccgtgtccgtaactccgatccaaaggattgtcctgagcggtgaaaatgccctgaagatcgacatccatgtcatcatcccgtatgaaggtctgagcgccgaccaaatggcccagatcgaaaaaatttttaaggtggtgtaccctgtggatgatcatcactttaaggtgatcctgcactatggcacactggtaatcgacggggttacgccgaacatgatcaactatttcggacggccgtatgaaggcatcgccgtgttcgacggcaaaaagatcactgtaacagggaccctgtggaacggcaacaaaattatcgacgagcgcctgatcacccccgacggctccatgctgttccgagtaaccatcaacccc

SEQ ID NO: 1884 - protein, 158 aa, Artificial Sequence
  Synthetic
VFTLEDFVGDWEQTAAYNLDQVLEQGGVSSLGQNLAVSVTPIQRIVLSGENALKIDIHVIIPYEGLSADQMAQIEKIFKVVYPVDDHHFKVILHYGTLVIDGVTPNMINYFGRPYEGIAVFDGKKITVTGTLWNGNKIIDERLITPDGSMLFRVTINP

SEQ ID NO: 1885 - DNA, 474 bp, Artificial Sequence
  Synthetic
gtcttcacactcgaagatttcgttggggactgggaacagacagccgcctacaacctggaccaagtccttgaacagggaggtgtgtccagtttgcaccagaatctcgccgtgtccgtaactccgatccaaaggattgtcctgagcggtgaaaatgccctgaagatcgacatccatgtcatcatcccgtatgaaggtctgagcgccgaccaaatggcccagatcgaaaaaatttttaaggtggtgtaccctgtggatgatcatcactttaaggtgatcctgcactatggcacactggtaatcgacggggttacgccgaacatgatcaactatttcggacggccgtatgaaggcatcgccgtgttcgacggcaaaaagatcactgtaacagggaccctgtggaacggcaacaaaattatcgacgagcgcctgatcacccccgacggctccatgctgttccgagtaaccatcaacccc

SEQ ID NO: 1886 - protein, 158 aa, Artificial Sequence
  Synthetic
VFTLEDFVGDWEQTAAYNLDQVLEQGGVSSLHQNLAVSVTPIQRIVLSGENALKIDIHVIIPYEGLSADQMAQIEKIFKVVYPVDDHHFKVILHYGTLVIDGVTPNMINYFGRPYEGIAVFDGKKITVTGTLWNGNKIIDERLITPDGSMLFRVTINP

SEQ ID NO: 1887 - DNA, 474 bp, Artificial Sequence
  Synthetic
gtcttcacactcgaagatttcgttggggactgggaacagacagccgcctacaacctggaccaagtccttgaacagggaggtgtgtccagtttgatccagaatctcgccgtgtccgtaactccgatccaaaggattgtcctgagcggtgaaaatgccctgaagatcgacatccatgtcatcatcccgtatgaaggtctgagcgccgaccaaatggcccagatcgaaaaaatttttaaggtggtgtaccctgtggatgatcatcactttaaggtgatcctgcactatggcacactggtaatcgacggggttacgccgaacatgatcaactatttcggacggccgtatgaaggcatcgccgtgttcgacggcaaaaagatcactgtaacagggaccctgtggaacggcaacaaaattatcgacgagcgcctgatcacccccgacggctccatgctgttccgagtaaccatcaacccc

SEQ ID NO: 1888 - protein, 158 aa, Artificial Sequence
  Synthetic
VFTLEDFVGDWEQTAAYNLDQVLEQGGVSSLIQNLAVSVTPIQRIVLSGENALKIDIHVIIPYEGLSADQMAQIEKIFKVVYPVDDHHFKVILHYGTLVIDGVTPNMINYFGRPYEGIAVFDGKKITVTGTLWNGNKIIDERLITPDGSMLFRVTINP

SEQ ID NO: 1889 - DNA, 474 bp, Artificial Sequence
  Synthetic
gtcttcacactcgaagatttcgttggggactgggaacagacagccgcctacaacctggaccaagtccttgaacagggaggtgtgtccagtttgaagcagaatctcgccgtgtccgtaactccgatccaaaggattgtcctgagcggtgaaaatgccctgaagatcgacatccatgtcatcatcccgtatgaaggtctgagcgccgaccaaatggcccagatcgaaaaaatttttaaggtggtgtaccctgtggatgatcatcactttaaggtgatcctgcactatggcacactggtaatcgacggggttacgccgaacatgatcaactatttcggacggccgtatgaaggcatcgccgtgttcgacggcaaaaagatcactgtaacagggaccctgtggaacggcaacaaaattatcgacgagcgcctgatcacccccgacggctccatgctgttccgagtaaccatcaacccc

SEQ ID NO: 1890 - protein, 158 aa, Artificial Sequence
  Synthetic
VFTLEDFVGDWEQTAAYNLDQVLEQGGVSSLKQNLAVSVTPIQRIVLSGENALKIDIHVIIPYEGLSADQMAQIEKIFKVVYPVDDHHFKVILHYGTLVIDGVTPNMINYFGRPYEGIAVFDGKKITVTGTLWNGNKIIDERLITPDGSMLFRVTINP

SEQ ID NO: 1891 - DNA, 474 bp, Artificial Sequence
  Synthetic
gtcttcacactcgaagatttcgttggggactgggaacagacagccgcctacaacctggaccaagtccttgaacagggaggtgtgtccagtttgctgcagaatctcgccgtgtccgtaactccgatccaaaggattgtcctgagcggtgaaaatgccctgaagatcgacatccatgtcatcatcccgtatgaaggtctgagcgccgaccaaatggcccagatcgaaaaaatttttaaggtggtgtaccctgtggatgatcatcactttaaggtgatcctgcactatggcacactggtaatcgacggggttacgccgaacatgatcaactatttcggacggccgtatgaaggcatcgccgtgttcgacggcaaaaagatcactgtaacagggaccctgtggaacggcaacaaaattatcgacgagcgcctgatcacccccgacggctccatgctgttccgagtaaccatcaacccc

SEQ ID NO: 1892 - protein, 158 aa, Artificial Sequence
  Synthetic
VFTLEDFVGDWEQTAAYNLDQVLEQGGVSSLLQNLAVSVTPIQRIVLSGENALKIDIHVIIPYEGLSADQMAQIEKIFKVVYPVDDHHFKVILHYGTLVIDGVTPNMINYFGRPYEGIAVFDGKKITVTGTLWNGNKIIDERLITPDGSMLFRVTINP

SEQ ID NO: 1893 - DNA, 474 bp, Artificial Sequence
  Synthetic
gtcttcacactcgaagatttcgttggggactgggaacagacagccgcctacaacctggaccaagtccttgaacagggaggtgtgtccagtttgatgcagaatctcgccgtgtccgtaactccgatccaaaggattgtcctgagcggtgaaaatgccctgaagatcgacatccatgtcatcatcccgtatgaaggtctgagcgccgaccaaatggcccagatcgaaaaaatttttaaggtggtgtaccctgtggatgatcatcactttaaggtgatcctgcactatggcacactggtaatcgacggggttacgccgaacatgatcaactatttcggacggccgtatgaaggcatcgccgtgttcgacggcaaaaagatcactgtaacagggaccctgtggaacggcaacaaaattatcgacgagcgcctgatcacccccgacggctccatgctgttccgagtaaccatcaacccc

SEQ ID NO: 1894 - protein, 158 aa, Artificial Sequence
  Synthetic
VFTLEDFVGDWEQTAAYNLDQVLEQGGVSSLMQNLAVSVTPIQRIVLSGENALKIDIHVIIPYEGLSADQMAQIEKIFKVVYPVDDHHFKVILHYGTLVIDGVTPNMINYFGRPYEGIAVFDGKKITVTGTLWNGNKIIDERLITPDGSMLFRVTINP

SEQ ID NO: 1895 - DNA, 474 bp, Artificial Sequence
  Synthetic
gtcttcacactcgaagatttcgttggggactgggaacagacagccgcctacaacctggaccaagtccttgaacagggaggtgtgtccagtttgaaccagaatctcgccgtgtccgtaactccgatccaaaggattgtcctgagcggtgaaaatgccctgaagatcgacatccatgtcatcatcccgtatgaaggtctgagcgccgaccaaatggcccagatcgaaaaaatttttaaggtggtgtaccctgtggatgatcatcactttaaggtgatcctgcactatggcacactggtaatcgacggggttacgccgaacatgatcaactatttcggacggccgtatgaaggcatcgccgtgttcgacggcaaaaagatcactgtaacagggaccctgtggaacggcaacaaaattatcgacgagcgcctgatcacccccgacggctccatgctgttccgagtaaccatcaacccc

SEQ ID NO: 1896 - protein, 158 aa, Artificial Sequence
  Synthetic
VFTLEDFVGDWEQTAAYNLDQVLEQGGVSSLNQNLAVSVTPIQRIVLSGENALKIDIHVIIPYEGLSADQMAQIEKIFKVVYPVDDHHFKVILHYGTLVIDGVTPNMINYFGRPYEGIAVFDGKKITVTGTLWNGNKIIDERLITPDGSMLFRVTINP

SEQ ID NO: 1897 - DNA, 474 bp, Artificial Sequence
  Synthetic
gtcttcacactcgaagatttcgttggggactgggaacagacagccgcctacaacctggaccaagtccttgaacagggaggtgtgtccagtttgccccagaatctcgccgtgtccgtaactccgatccaaaggattgtcctgagcggtgaaaatgccctgaagatcgacatccatgtcatcatcccgtatgaaggtctgagcgccgaccaaatggcccagatcgaaaaaatttttaaggtggtgtaccctgtggatgatcatcactttaaggtgatcctgcactatggcacactggtaatcgacggggttacgccgaacatgatcaactatttcggacggccgtatgaaggcatcgccgtgttcgacggcaaaaagatcactgtaacagggaccctgtggaacggcaacaaaattatcgacgagcgcctgatcacccccgacggctccatgctgttccgagtaaccatcaacccc

SEQ ID NO: 1898 - protein, 158 aa, Artificial Sequence
  Synthetic
VFTLEDFVGDWEQTAAYNLDQVLEQGGVSSLPQNLAVSVTPIQRIVLSGENALKIDIHVIIPYEGLSADQMAQIEKIFKVVYPVDDHHFKVILHYGTLVIDGVTPNMINYFGRPYEGIAVFDGKKITVTGTLWNGNKIIDERLITPDGSMLFRVTINP

SEQ ID NO: 1899 - DNA, 474 bp, Artificial Sequence
  Synthetic
gtcttcacactcgaagatttcgttggggactgggaacagacagccgcctacaacctggaccaagtccttgaacagggaggtgtgtccagtttgcagcagaatctcgccgtgtccgtaactccgatccaaaggattgtcctgagcggtgaaaatgccctgaagatcgacatccatgtcatcatcccgtatgaaggtctgagcgccgaccaaatggcccagatcgaaaaaatttttaaggtggtgtaccctgtggatgatcatcactttaaggtgatcctgcactatggcacactggtaatcgacggggttacgccgaacatgatcaactatttcggacggccgtatgaaggcatcgccgtgttcgacggcaaaaagatcactgtaacagggaccctgtggaacggcaacaaaattatcgacgagcgcctgatcacccccgacggctccatgctgttccgagtaaccatcaacccc

SEQ ID NO: 1900 - protein, 158 aa, Artificial Sequence
  Synthetic
VFTLEDFVGDWEQTAAYNLDQVLEQGGVSSLQQNLAVSVTPIQRIVLSGENALKIDIHVIIPYEGLSADQMAQIEKIFKVVYPVDDHHFKVILHYGTLVIDGVTPNMINYFGRPYEGIAVFDGKKITVTGTLWNGNKIIDERLITPDGSMLFRVTINP

SEQ ID NO: 1901 - DNA, 474 bp, Artificial Sequence
  Synthetic
gtcttcacactcgaagatttcgttggggactgggaacagacagccgcctacaacctggaccaagtccttgaacagggaggtgtgtccagtttgcggcagaatctcgccgtgtccgtaactccgatccaaaggattgtcctgagcggtgaaaatgccctgaagatcgacatccatgtcatcatcccgtatgaaggtctgagcgccgaccaaatggcccagatcgaaaaaatttttaaggtggtgtaccctgtggatgatcatcactttaaggtgatcctgcactatggcacactggtaatcgacggggttacgccgaacatgatcaactatttcggacggccgtatgaaggcatcgccgtgttcgacggcaaaaagatcactgtaacagggaccctgtggaacggcaacaaaattatcgacgagcgcctgatcacccccgacggctccatgctgttccgagtaaccatcaacccc

SEQ ID NO: 1902 - protein, 158 aa, Artificial Sequence
  Synthetic
VFTLEDFVGDWEQTAAYNLDQVLEQGGVSSLRQNLAVSVTPIQRIVLSGENALKIDIHVIIPYEGLSADQMAQIEKIFKVVYPVDDHHFKVILHYGTLVIDGVTPNMINYFGRPYEGIAVFDGKKITVTGTLWNGNKIIDERLITPDGSMLFRVTINP

SEQ ID NO: 1903 - DNA, 474 bp, Artificial Sequence
  Synthetic
gtcttcacactcgaagatttcgttggggactgggaacagacagccgcctacaacctggaccaagtccttgaacagggaggtgtgtccagtttgagccagaatctcgccgtgtccgtaactccgatccaaaggattgtcctgagcggtgaaaatgccctgaagatcgacatccatgtcatcatcccgtatgaaggtctgagcgccgaccaaatggcccagatcgaaaaaatttttaaggtggtgtaccctgtggatgatcatcactttaaggtgatcctgcactatggcacactggtaatcgacggggttacgccgaacatgatcaactatttcggacggccgtatgaaggcatcgccgtgttcgacggcaaaaagatcactgtaacagggaccctgtggaacggcaacaaaattatcgacgagcgcctgatcacccccgacggctccatgctgttccgagtaaccatcaacccc

SEQ ID NO: 1904 - protein, 158 aa, Artificial Sequence
  Synthetic
VFTLEDFVGDWEQTAAYNLDQVLEQGGVSSLSQNLAVSVTPIQRIVLSGENALKIDIHVIIPYEGLSADQMAQIEKIFKVVYPVDDHHFKVILHYGTLVIDGVTPNMINYFGRPYEGIAVFDGKKITVTGTLWNGNKIIDERLITPDGSMLFRVTINP

SEQ ID NO: 1905 - DNA, 474 bp, Artificial Sequence
  Synthetic
gtcttcacactcgaagatttcgttggggactgggaacagacagccgcctacaacctggaccaagtccttgaacagggaggtgtgtccagtttgacccagaatctcgccgtgtccgtaactccgatccaaaggattgtcctgagcggtgaaaatgccctgaagatcgacatccatgtcatcatcccgtatgaaggtctgagcgccgaccaaatggcccagatcgaaaaaatttttaaggtggtgtaccctgtggatgatcatcactttaaggtgatcctgcactatggcacactggtaatcgacggggttacgccgaacatgatcaactatttcggacggccgtatgaaggcatcgccgtgttcgacggcaaaaagatcactgtaacagggaccctgtggaacggcaacaaaattatcgacgagcgcctgatcacccccgacggctccatgctgttccgagtaaccatcaacccc

SEQ ID NO: 1906 - protein, 158 aa, Artificial Sequence
  Synthetic
VFTLEDFVGDWEQTAAYNLDQVLEQGGVSSLTQNLAVSVTPIQRIVLSGENALKIDIHVIIPYEGLSADQMAQIEKIFKVVYPVDDHHFKVILHYGTLVIDGVTPNMINYFGRPYEGIAVFDGKKITVTGTLWNGNKIIDERLITPDGSMLFRVTINP

SEQ ID NO: 1907 - DNA, 474 bp, Artificial Sequence
  Synthetic
gtcttcacactcgaagatttcgttggggactgggaacagacagccgcctacaacctggaccaagtccttgaacagggaggtgtgtccagtttggtgcagaatctcgccgtgtccgtaactccgatccaaaggattgtcctgagcggtgaaaatgccctgaagatcgacatccatgtcatcatcccgtatgaaggtctgagcgccgaccaaatggcccagatcgaaaaaatttttaaggtggtgtaccctgtggatgatcatcactttaaggtgatcctgcactatggcacactggtaatcgacggggttacgccgaacatgatcaactatttcggacggccgtatgaaggcatcgccgtgttcgacggcaaaaagatcactgtaacagggaccctgtggaacggcaacaaaattatcgacgagcgcctgatcacccccgacggctccatgctgttccgagtaaccatcaacccc

SEQ ID NO: 1908 - protein, 158 aa, Artificial Sequence
  Synthetic
VFTLEDFVGDWEQTAAYNLDQVLEQGGVSSLVQNLAVSVTPIQRIVLSGENALKIDIHVIIPYEGLSADQMAQIEKIFKVVYPVDDHHFKVILHYGTLVIDGVTPNMINYFGRPYEGIAVFDGKKITVTGTLWNGNKIIDERLITPDGSMLFRVTINP

SEQ ID NO: 1909 - DNA, 474 bp, Artificial Sequence
  Synthetic
gtcttcacactcgaagatttcgttggggactgggaacagacagccgcctacaacctggaccaagtccttgaacagggaggtgtgtccagtttgtggcagaatctcgccgtgtccgtaactccgatccaaaggattgtcctgagcggtgaaaatgccctgaagatcgacatccatgtcatcatcccgtatgaaggtctgagcgccgaccaaatggcccagatcgaaaaaatttttaaggtggtgtaccctgtggatgatcatcactttaaggtgatcctgcactatggcacactggtaatcgacggggttacgccgaacatgatcaactatttcggacggccgtatgaaggcatcgccgtgttcgacggcaaaaagatcactgtaacagggaccctgtggaacggcaacaaaattatcgacgagcgcctgatcacccccgacggctccatgctgttccgagtaaccatcaacccc

SEQ ID NO: 1910 - protein, 158 aa, Artificial Sequence
  Synthetic
VFTLEDFVGDWEQTAAYNLDQVLEQGGVSSLWQNLAVSVTPIQRIVLSGENALKIDIHVIIPYEGLSADQMAQIEKIFKVVYPVDDHHFKVILHYGTLVIDGVTPNMINYFGRPYEGIAVFDGKKITVTGTLWNGNKIIDERLITPDGSMLFRVTINP

SEQ ID NO: 1911 - DNA, 474 bp, Artificial Sequence
  Synthetic
gtcttcacactcgaagatttcgttggggactgggaacagacagccgcctacaacctggaccaagtccttgaacagggaggtgtgtccagtttgtaccagaatctcgccgtgtccgtaactccgatccaaaggattgtcctgagcggtgaaaatgccctgaagatcgacatccatgtcatcatcccgtatgaaggtctgagcgccgaccaaatggcccagatcgaaaaaatttttaaggtggtgtaccctgtggatgatcatcactttaaggtgatcctgcactatggcacactggtaatcgacggggttacgccgaacatgatcaactatttcggacggccgtatgaaggcatcgccgtgttcgacggcaaaaagatcactgtaacagggaccctgtggaacggcaacaaaattatcgacgagcgcctgatcacccccgacggctccatgctgttccgagtaaccatcaacccc

SEQ ID NO: 1912 - protein, 158 aa, Artificial Sequence
  Synthetic
VFTLEDFVGDWEQTAAYNLDQVLEQGGVSSLYQNLAVSVTPIQRIVLSGENALKIDIHVIIPYEGLSADQMAQIEKIFKVVYPVDDHHFKVILHYGTLVIDGVTPNMINYFGRPYEGIAVFDGKKITVTGTLWNGNKIIDERLITPDGSMLFRVTINP

SEQ ID NO: 1913 - DNA, 474 bp, Artificial Sequence
  Synthetic
gtcttcacactcgaagatttcgttggggactgggaacagacagccgcctacaacctggaccaagtccttgaacagggaggtgtgtccagtttgtttcagaatctcgccgtgtccgtaactccgatccaaaggattgtcgccagcggtgaaaatgccctgaagatcgacatccatgtcatcatcccgtatgaaggtctgagcgccgaccaaatggcccagatcgaaaaaatttttaaggtggtgtaccctgtggatgatcatcactttaaggtgatcctgcactatggcacactggtaatcgacggggttacgccgaacatgatcaactatttcggacggccgtatgaaggcatcgccgtgttcgacggcaaaaagatcactgtaacagggaccctgtggaacggcaacaaaattatcgacgagcgcctgatcacccccgacggctccatgctgttccgagtaaccatcaacccc

SEQ ID NO: 1914 - protein, 158 aa, Artificial Sequence
  Synthetic
VFTLEDFVGDWEQTAAYNLDQVLEQGGVSSLFQNLAVSVTPIQRIVASGENALKIDIHVIIPYEGLSADQMAQIEKIFKVVYPVDDHHFKVILHYGTLVIDGVTPNMINYFGRPYEGIAVFDGKKITVTGTLWNGNKIIDERLITPDGSMLFRVTINP

SEQ ID NO: 1915 - DNA, 474 bp, Artificial Sequence
  Synthetic
gtcttcacactcgaagatttcgttggggactgggaacagacagccgcctacaacctggaccaagtccttgaacagggaggtgtgtccagtttgtttcagaatctcgccgtgtccgtaactccgatccaaaggattgtctgcagcggtgaaaatgccctgaagatcgacatccatgtcatcatcccgtatgaaggtctgagcgccgaccaaatggcccagatcgaaaaaatttttaaggtggtgtaccctgtggatgatcatcactttaaggtgatcctgcactatggcacactggtaatcgacggggttacgccgaacatgatcaactatttcggacggccgtatgaaggcatcgccgtgttcgacggcaaaaagatcactgtaacagggaccctgtggaacggcaacaaaattatcgacgagcgcctgatcacccccgacggctccatgctgttccgagtaaccatcaacccc

SEQ ID NO: 1916 - protein, 158 aa, Artificial Sequence
  Synthetic
VFTLEDFVGDWEQTAAYNLDQVLEQGGVSSLFQNLAVSVTPIQRIVCSGENALKIDIHVIIPYEGLSADQMAQIEKIFKVVYPVDDHHFKVILHYGTLVIDGVTPNMINYFGRPYEGIAVFDGKKITVTGTLWNGNKIIDERLITPDGSMLFRVTINP

SEQ ID NO: 1917 - DNA, 474 bp, Artificial Sequence
  Synthetic
gtcttcacactcgaagatttcgttggggactgggaacagacagccgcctacaacctggaccaagtccttgaacagggaggtgtgtccagtttgtttcagaatctcgccgtgtccgtaactccgatccaaaggattgtcgacagcggtgaaaatgccctgaagatcgacatccatgtcatcatcccgtatgaaggtctgagcgccgaccaaatggcccagatcgaaaaaatttttaaggtggtgtaccctgtggatgatcatcactttaaggtgatcctgcactatggcacactggtaatcgacggggttacgccgaacatgatcaactatttcggacggccgtatgaaggcatcgccgtgttcgacggcaaaaagatcactgtaacagggaccctgtggaacggcaacaaaattatcgacgagcgcctgatcacccccgacggctccatgctgttccgagtaaccatcaacccc

SEQ ID NO: 1918 - protein, 158 aa, Artificial Sequence
  Synthetic
VFTLEDFVGDWEQTAAYNLDQVLEQGGVSSLFQNLAVSVTPIQRIVDSGENALKIDIHVIIPYEGLSADQMAQIEKIFKVVYPVDDHHFKVILHYGTLVIDGVTPNMINYFGRPYEGIAVFDGKKITVTGTLWNGNKIIDERLITPDGSMLFRVTINP

SEQ ID NO: 1919 - DNA, 474 bp, Artificial Sequence
  Synthetic
gtcttcacactcgaagatttcgttggggactgggaacagacagccgcctacaacctggaccaagtccttgaacagggaggtgtgtccagtttgtttcagaatctcgccgtgtccgtaactccgatccaaaggattgtcgagagcggtgaaaatgccctgaagatcgacatccatgtcatcatcccgtatgaaggtctgagcgccgaccaaatggcccagatcgaaaaaatttttaaggtggtgtaccctgtggatgatcatcactttaaggtgatcctgcactatggcacactggtaatcgacggggttacgccgaacatgatcaactatttcggacggccgtatgaaggcatcgccgtgttcgacggcaaaaagatcactgtaacagggaccctgtggaacggcaacaaaattatcgacgagcgcctgatcacccccgacggctccatgctgttccgagtaaccatcaacccc

SEQ ID NO: 1920 - protein, 158 aa, Artificial Sequence
  Synthetic
VFTLEDFVGDWEQTAAYNLDQVLEQGGVSSLFQNLAVSVTPIQRIVESGENALKIDIHVIIPYEGLSADQMAQIEKIFKVVYPVDDHHFKVILHYGTLVIDGVTPNMINYFGRPYEGIAVFDGKKITVTGTLWNGNKIIDERLITPDGSMLFRVTINP

SEQ ID NO: 1921 - DNA, 474 bp, Artificial Sequence
  Synthetic
gtcttcacactcgaagatttcgttggggactgggaacagacagccgcctacaacctggaccaagtccttgaacagggaggtgtgtccagtttgtttcagaatctcgccgtgtccgtaactccgatccaaaggattgtcttcagcggtgaaaatgccctgaagatcgacatccatgtcatcatcccgtatgaaggtctgagcgccgaccaaatggcccagatcgaaaaaatttttaaggtggtgtaccctgtggatgatcatcactttaaggtgatcctgcactatggcacactggtaatcgacggggttacgccgaacatgatcaactatttcggacggccgtatgaaggcatcgccgtgttcgacggcaaaaagatcactgtaacagggaccctgtggaacggcaacaaaattatcgacgagcgcctgatcacccccgacggctccatgctgttccgagtaaccatcaacccc

SEQ ID NO: 1922 - protein, 158 aa, Artificial Sequence
  Synthetic
VFTLEDFVGDWEQTAAYNLDQVLEQGGVSSLFQNLAVSVTPIQRIVFSGENALKIDIHVIIPYEGLSADQMAQIEKIFKVVYPVDDHHFKVILHYGTLVIDGVTPNMINYFGRPYEGIAVFDGKKITVTGTLWNGNKIIDERLITPDGSMLFRVTINP

SEQ ID NO: 1923 - DNA, 474 bp, Artificial Sequence
  Synthetic
gtcttcacactcgaagatttcgttggggactgggaacagacagccgcctacaacctggaccaagtccttgaacagggaggtgtgtccagtttgtttcagaatctcgccgtgtccgtaactccgatccaaaggattgtcggcagcggtgaaaatgccctgaagatcgacatccatgtcatcatcccgtatgaaggtctgagcgccgaccaaatggcccagatcgaaaaaatttttaaggtggtgtaccctgtggatgatcatcactttaaggtgatcctgcactatggcacactggtaatcgacggggttacgccgaacatgatcaactatttcggacggccgtatgaaggcatcgccgtgttcgacggcaaaaagatcactgtaacagggaccctgtggaacggcaacaaaattatcgacgagcgcctgatcacccccgacggctccatgctgttccgagtaaccatcaacccc

SEQ ID NO: 1924 - protein, 158 aa, Artificial Sequence
  Synthetic
VFTLEDFVGDWEQTAAYNLDQVLEQGGVSSLFQNLAVSVTPIQRIVGSGENALKIDIHVIIPYEGLSADQMAQIEKIFKVVYPVDDHHFKVILHYGTLVIDGVTPNMINYFGRPYEGIAVFDGKKITVTGTLWNGNKIIDERLITPDGSMLFRVTINP

SEQ ID NO: 1925 - DNA, 474 bp, Artificial Sequence
  Synthetic
gtcttcacactcgaagatttcgttggggactgggaacagacagccgcctacaacctggaccaagtccttgaacagggaggtgtgtccagtttgtttcagaatctcgccgtgtccgtaactccgatccaaaggattgtccacagcggtgaaaatgccctgaagatcgacatccatgtcatcatcccgtatgaaggtctgagcgccgaccaaatggcccagatcgaaaaaatttttaaggtggtgtaccctgtggatgatcatcactttaaggtgatcctgcactatggcacactggtaatcgacggggttacgccgaacatgatcaactatttcggacggccgtatgaaggcatcgccgtgttcgacggcaaaaagatcactgtaacagggaccctgtggaacggcaacaaaattatcgacgagcgcctgatcacccccgacggctccatgctgttccgagtaaccatcaacccc

SEQ ID NO: 1926 - protein, 158 aa, Artificial Sequence
  Synthetic
VFTLEDFVGDWEQTAAYNLDQVLEQGGVSSLFQNLAVSVTPIQRIVHSGENALKIDIHVIIPYEGLSADQMAQIEKIFKVVYPVDDHHFKVILHYGTLVIDGVTPNMINYFGRPYEGIAVFDGKKITVTGTLWNGNKIIDERLITPDGSMLFRVTINP

SEQ ID NO: 1927 - DNA, 474 bp, Artificial Sequence
  Synthetic
gtcttcacactcgaagatttcgttggggactgggaacagacagccgcctacaacctggaccaagtccttgaacagggaggtgtgtccagtttgtttcagaatctcgccgtgtccgtaactccgatccaaaggattgtcatcagcggtgaaaatgccctgaagatcgacatccatgtcatcatcccgtatgaaggtctgagcgccgaccaaatggcccagatcgaaaaaatttttaaggtggtgtaccctgtggatgatcatcactttaaggtgatcctgcactatggcacactggtaatcgacggggttacgccgaacatgatcaactatttcggacggccgtatgaaggcatcgccgtgttcgacggcaaaaagatcactgtaacagggaccctgtggaacggcaacaaaattatcgacgagcgcctgatcacccccgacggctccatgctgttccgagtaaccatcaacccc

SEQ ID NO: 1928 - protein, 158 aa, Artificial Sequence
  Synthetic
VFTLEDFVGDWEQTAAYNLDQVLEQGGVSSLFQNLAVSVTPIQRIVISGENALKIDIHVIIPYEGLSADQMAQIEKIFKVVYPVDDHHFKVILHYGTLVIDGVTPNMINYFGRPYEGIAVFDGKKITVTGTLWNGNKIIDERLITPDGSMLFRVTINP

SEQ ID NO: 1929 - DNA, 474 bp, Artificial Sequence
  Synthetic
gtcttcacactcgaagatttcgttggggactgggaacagacagccgcctacaacctggaccaagtccttgaacagggaggtgtgtccagtttgtttcagaatctcgccgtgtccgtaactccgatccaaaggattgtcaagagcggtgaaaatgccctgaagatcgacatccatgtcatcatcccgtatgaaggtctgagcgccgaccaaatggcccagatcgaaaaaatttttaaggtggtgtaccctgtggatgatcatcactttaaggtgatcctgcactatggcacactggtaatcgacggggttacgccgaacatgatcaactatttcggacggccgtatgaaggcatcgccgtgttcgacggcaaaaagatcactgtaacagggaccctgtggaacggcaacaaaattatcgacgagcgcctgatcacccccgacggctccatgctgttccgagtaaccatcaacccc

SEQ ID NO: 1930 - protein, 158 aa, Artificial Sequence
  Synthetic
VFTLEDFVGDWEQTAAYNLDQVLEQGGVSSLFQNLAVSVTPIQRIVKSGENALKIDIHVIIPYEGLSADQMAQIEKIFKVVYPVDDHHFKVILHYGTLVIDGVTPNMINYFGRPYEGIAVFDGKKITVTGTLWNGNKIIDERLITPDGSMLFRVTINP

SEQ ID NO: 1931 - DNA, 474 bp, Artificial Sequence
  Synthetic
gtcttcacactcgaagatttcgttggggactgggaacagacagccgcctacaacctggaccaagtccttgaacagggaggtgtgtccagtttgtttcagaatctcgccgtgtccgtaactccgatccaaaggattgtcatgagcggtgaaaatgccctgaagatcgacatccatgtcatcatcccgtatgaaggtctgagcgccgaccaaatggcccagatcgaaaaaatttttaaggtggtgtaccctgtggatgatcatcactttaaggtgatcctgcactatggcacactggtaatcgacggggttacgccgaacatgatcaactatttcggacggccgtatgaaggcatcgccgtgttcgacggcaaaaagatcactgtaacagggaccctgtggaacggcaacaaaattatcgacgagcgcctgatcacccccgacggctccatgctgttccgagtaaccatcaacccc

SEQ ID NO: 1932 - protein, 158 aa, Artificial Sequence
  Synthetic
VFTLEDFVGDWEQTAAYNLDQVLEQGGVSSLFQNLAVSVTPIQRIVMSGENALKIDIHVIIPYEGLSADQMAQIEKIFKVVYPVDDHHFKVILHYGTLVIDGVTPNMINYFGRPYEGIAVFDGKKITVTGTLWNGNKIIDERLITPDGSMLFRVTINP

SEQ ID NO: 1933 - DNA, 474 bp, Artificial Sequence
  Synthetic
gtcttcacactcgaagatttcgttggggactgggaacagacagccgcctacaacctggaccaagtccttgaacagggaggtgtgtccagtttgtttcagaatctcgccgtgtccgtaactccgatccaaaggattgtcaacagcggtgaaaatgccctgaagatcgacatccatgtcatcatcccgtatgaaggtctgagcgccgaccaaatggcccagatcgaaaaaatttttaaggtggtgtaccctgtggatgatcatcactttaaggtgatcctgcactatggcacactggtaatcgacggggttacgccgaacatgatcaactatttcggacggccgtatgaaggcatcgccgtgttcgacggcaaaaagatcactgtaacagggaccctgtggaacggcaacaaaattatcgacgagcgcctgatcacccccgacggctccatgctgttccgagtaaccatcaacccc

SEQ ID NO: 1934 - protein, 158 aa, Artificial Sequence
  Synthetic
VFTLEDFVGDWEQTAAYNLDQVLEQGGVSSLFQNLAVSVTPIQRIVNSGENALKIDIHVIIPYEGLSADQMAQIEKIFKVVYPVDDHHFKVILHYGTLVIDGVTPNMINYFGRPYEGIAVFDGKKITVTGTLWNGNKIIDERLITPDGSMLFRVTINP

SEQ ID NO: 1935 - DNA, 474 bp, Artificial Sequence
  Synthetic
gtcttcacactcgaagatttcgttggggactgggaacagacagccgcctacaacctggaccaagtccttgaacagggaggtgtgtccagtttgtttcagaatctcgccgtgtccgtaactccgatccaaaggattgtccccagcggtgaaaatgccctgaagatcgacatccatgtcatcatcccgtatgaaggtctgagcgccgaccaaatggcccagatcgaaaaaatttttaaggtggtgtaccctgtggatgatcatcactttaaggtgatcctgcactatggcacactggtaatcgacggggttacgccgaacatgatcaactatttcggacggccgtatgaaggcatcgccgtgttcgacggcaaaaagatcactgtaacagggaccctgtggaacggcaacaaaattatcgacgagcgcctgatcacccccgacggctccatgctgttccgagtaaccatcaacccc

SEQ ID NO: 1936 - protein, 158 aa, Artificial Sequence
  Synthetic
VFTLEDFVGDWEQTAAYNLDQVLEQGGVSSLFQNLAVSVTPIQRIVPSGENALKIDIHVIIPYEGLSADQMAQIEKIFKVVYPVDDHHFKVILHYGTLVIDGVTPNMINYFGRPYEGIAVFDGKKITVTGTLWNGNKIIDERLITPDGSMLFRVTINP

SEQ ID NO: 1937 - DNA, 474 bp, Artificial Sequence
  Synthetic
gtcttcacactcgaagatttcgttggggactgggaacagacagccgcctacaacctggaccaagtccttgaacagggaggtgtgtccagtttgtttcagaatctcgccgtgtccgtaactccgatccaaaggattgtccagagcggtgaaaatgccctgaagatcgacatccatgtcatcatcccgtatgaaggtctgagcgccgaccaaatggcccagatcgaaaaaatttttaaggtggtgtaccctgtggatgatcatcactttaaggtgatcctgcactatggcacactggtaatcgacggggttacgccgaacatgatcaactatttcggacggccgtatgaaggcatcgccgtgttcgacggcaaaaagatcactgtaacagggaccctgtggaacggcaacaaaattatcgacgagcgcctgatcacccccgacggctccatgctgttccgagtaaccatcaacccc

SEQ ID NO: 1938 - protein, 158 aa, Artificial Sequence
  Synthetic
VFTLEDFVGDWEQTAAYNLDQVLEQGGVSSLFQNLAVSVTPIQRIVQSGENALKIDIHVIIPYEGLSADQMAQIEKIFKVVYPVDDHHFKVILHYGTLVIDGVTPNMINYFGRPYEGIAVFDGKKITVTGTLWNGNKIIDERLITPDGSMLFRVTINP

SEQ ID NO: 1939 - DNA, 474 bp, Artificial Sequence
  Synthetic
gtcttcacactcgaagatttcgttggggactgggaacagacagccgcctacaacctggaccaagtccttgaacagggaggtgtgtccagtttgtttcagaatctcgccgtgtccgtaactccgatccaaaggattgtccggagcggtgaaaatgccctgaagatcgacatccatgtcatcatcccgtatgaaggtctgagcgccgaccaaatggcccagatcgaaaaaatttttaaggtggtgtaccctgtggatgatcatcactttaaggtgatcctgcactatggcacactggtaatcgacggggttacgccgaacatgatcaactatttcggacggccgtatgaaggcatcgccgtgttcgacggcaaaaagatcactgtaacagggaccctgtggaacggcaacaaaattatcgacgagcgcctgatcacccccgacggctccatgctgttccgagtaaccatcaacccc

SEQ ID NO: 1940 - protein, 158 aa, Artificial Sequence
  Synthetic
VFTLEDFVGDWEQTAAYNLDQVLEQGGVSSLFQNLAVSVTPIQRIVRSGENALKIDIHVIIPYEGLSADQMAQIEKIFKVVYPVDDHHFKVILHYGTLVIDGVTPNMINYFGRPYEGIAVFDGKKITVTGTLWNGNKIIDERLITPDGSMLFRVTINP

SEQ ID NO: 1941 - DNA, 474 bp, Artificial Sequence
  Synthetic
gtcttcacactcgaagatttcgttggggactgggaacagacagccgcctacaacctggaccaagtccttgaacagggaggtgtgtccagtttgtttcagaatctcgccgtgtccgtaactccgatccaaaggattgtcagcagcggtgaaaatgccctgaagatcgacatccatgtcatcatcccgtatgaaggtctgagcgccgaccaaatggcccagatcgaaaaaatttttaaggtggtgtaccctgtggatgatcatcactttaaggtgatcctgcactatggcacactggtaatcgacggggttacgccgaacatgatcaactatttcggacggccgtatgaaggcatcgccgtgttcgacggcaaaaagatcactgtaacagggaccctgtggaacggcaacaaaattatcgacgagcgcctgatcacccccgacggctccatgctgttccgagtaaccatcaacccc

SEQ ID NO: 1942 - protein, 158 aa, Artificial Sequence
  Synthetic
VFTLEDFVGDWEQTAAYNLDQVLEQGGVSSLFQNLAVSVTPIQRIVSSGENALKIDIHVIIPYEGLSADQMAQIEKIFKVVYPVDDHHFKVILHYGTLVIDGVTPNMINYFGRPYEGIAVFDGKKITVTGTLWNGNKIIDERLITPDGSMLFRVTINP

SEQ ID NO: 1943 - DNA, 474 bp, Artificial Sequence
  Synthetic
gtcttcacactcgaagatttcgttggggactgggaacagacagccgcctacaacctggaccaagtccttgaacagggaggtgtgtccagtttgtttcagaatctcgccgtgtccgtaactccgatccaaaggattgtcaccagcggtgaaaatgccctgaagatcgacatccatgtcatcatcccgtatgaaggtctgagcgccgaccaaatggcccagatcgaaaaaatttttaaggtggtgtaccctgtggatgatcatcactttaaggtgatcctgcactatggcacactggtaatcgacggggttacgccgaacatgatcaactatttcggacggccgtatgaaggcatcgccgtgttcgacggcaaaaagatcactgtaacagggaccctgtggaacggcaacaaaattatcgacgagcgcctgatcacccccgacggctccatgctgttccgagtaaccatcaacccc

SEQ ID NO: 1944 - protein, 158 aa, Artificial Sequence
  Synthetic
VFTLEDFVGDWEQTAAYNLDQVLEQGGVSSLFQNLAVSVTPIQRIVTSGENALKIDIHVIIPYEGLSADQMAQIEKIFKVVYPVDDHHFKVILHYGTLVIDGVTPNMINYFGRPYEGIAVFDGKKITVTGTLWNGNKIIDERLITPDGSMLFRVTINP

SEQ ID NO: 1945 - DNA, 474 bp, Artificial Sequence
  Synthetic
gtcttcacactcgaagatttcgttggggactgggaacagacagccgcctacaacctggaccaagtccttgaacagggaggtgtgtccagtttgtttcagaatctcgccgtgtccgtaactccgatccaaaggattgtcgtgagcggtgaaaatgccctgaagatcgacatccatgtcatcatcccgtatgaaggtctgagcgccgaccaaatggcccagatcgaaaaaatttttaaggtggtgtaccctgtggatgatcatcactttaaggtgatcctgcactatggcacactggtaatcgacggggttacgccgaacatgatcaactatttcggacggccgtatgaaggcatcgccgtgttcgacggcaaaaagatcactgtaacagggaccctgtggaacggcaacaaaattatcgacgagcgcctgatcacccccgacggctccatgctgttccgagtaaccatcaacccc

SEQ ID NO: 1946 - protein, 158 aa, Artificial Sequence
  Synthetic
VFTLEDFVGDWEQTAAYNLDQVLEQGGVSSLFQNLAVSVTPIQRIVVSGENALKIDIHVIIPYEGLSADQMAQIEKIFKVVYPVDDHHFKVILHYGTLVIDGVTPNMINYFGRPYEGIAVFDGKKITVTGTLWNGNKIIDERLITPDGSMLFRVTINP

SEQ ID NO: 1947 - DNA, 474 bp, Artificial Sequence
  Synthetic
gtcttcacactcgaagatttcgttggggactgggaacagacagccgcctacaacctggaccaagtccttgaacagggaggtgtgtccagtttgtttcagaatctcgccgtgtccgtaactccgatccaaaggattgtctggagcggtgaaaatgccctgaagatcgacatccatgtcatcatcccgtatgaaggtctgagcgccgaccaaatggcccagatcgaaaaaatttttaaggtggtgtaccctgtggatgatcatcactttaaggtgatcctgcactatggcacactggtaatcgacggggttacgccgaacatgatcaactatttcggacggccgtatgaaggcatcgccgtgttcgacggcaaaaagatcactgtaacagggaccctgtggaacggcaacaaaattatcgacgagcgcctgatcacccccgacggctccatgctgttccgagtaaccatcaacccc

SEQ ID NO: 1948 - protein, 158 aa, Artificial Sequence
  Synthetic
VFTLEDFVGDWEQTAAYNLDQVLEQGGVSSLFQNLAVSVTPIQRIVWSGENALKIDIHVIIPYEGLSADQMAQIEKIFKVVYPVDDHHFKVILHYGTLVIDGVTPNMINYFGRPYEGIAVFDGKKITVTGTLWNGNKIIDERLITPDGSMLFRVTINP

SEQ ID NO: 1949 - DNA, 474 bp, Artificial Sequence
  Synthetic
gtcttcacactcgaagatttcgttggggactgggaacagacagccgcctacaacctggaccaagtccttgaacagggaggtgtgtccagtttgtttcagaatctcgccgtgtccgtaactccgatccaaaggattgtctacagcggtgaaaatgccctgaagatcgacatccatgtcatcatcccgtatgaaggtctgagcgccgaccaaatggcccagatcgaaaaaatttttaaggtggtgtaccctgtggatgatcatcactttaaggtgatcctgcactatggcacactggtaatcgacggggttacgccgaacatgatcaactatttcggacggccgtatgaaggcatcgccgtgttcgacggcaaaaagatcactgtaacagggaccctgtggaacggcaacaaaattatcgacgagcgcctgatcacccccgacggctccatgctgttccgagtaaccatcaacccc

SEQ ID NO: 1950 - protein, 158 aa, Artificial Sequence
  Synthetic
VFTLEDFVGDWEQTAAYNLDQVLEQGGVSSLFQNLAVSVTPIQRIVYSGENALKIDIHVIIPYEGLSADQMAQIEKIFKVVYPVDDHHFKVILHYGTLVIDGVTPNMINYFGRPYEGIAVFDGKKITVTGTLWNGNKIIDERLITPDGSMLFRVTINP

SEQ ID NO: 1951 - DNA, 474 bp, Artificial Sequence
  Synthetic
gtcttcacactcgaagatttcgttggggactgggaacagacagccgcctacaacctggaccaagtccttgaacagggaggtgtgtccagtttgtttcagaatctcgccgtgtccgtaactccgatccaaaggattgtcctgagcggtgaaaatgccctgaagatcgacatccatgtcatcatcccgtatgaaggtctgagcgccgaccaaatggcccagatcgaaaaaatttttaaggtggtgtaccctgtggatgatcatcactttaaggtgatcctgcactatggcacactggtaatcgacggggttacgccgaacatgatcgcctatttcggacggccgtatgaaggcatcgccgtgttcgacggcaaaaagatcactgtaacagggaccctgtggaacggcaacaaaattatcgacgagcgcctgatcacccccgacggctccatgctgttccgagtaaccatcaacccc

SEQ ID NO: 1952 - protein, 158 aa, Artificial Sequence
  Synthetic
VFTLEDFVGDWEQTAAYNLDQVLEQGGVSSLFQNLAVSVTPIQRIVLSGENALKIDIHVIIPYEGLSADQMAQIEKIFKVVYPVDDHHFKVILHYGTLVIDGVTPNMIAYFGRPYEGIAVFDGKKITVTGTLWNGNKIIDERLITPDGSMLFRVTINP

SEQ ID NO: 1953 - DNA, 474 bp, Artificial Sequence
  Synthetic
gtcttcacactcgaagatttcgttggggactgggaacagacagccgcctacaacctggaccaagtccttgaacagggaggtgtgtccagtttgtttcagaatctcgccgtgtccgtaactccgatccaaaggattgtcctgagcggtgaaaatgccctgaagatcgacatccatgtcatcatcccgtatgaaggtctgagcgccgaccaaatggcccagatcgaaaaaatttttaaggtggtgtaccctgtggatgatcatcactttaaggtgatcctgcactatggcacactggtaatcgacggggttacgccgaacatgatctgctatttcggacggccgtatgaaggcatcgccgtgttcgacggcaaaaagatcactgtaacagggaccctgtggaacggcaacaaaattatcgacgagcgcctgatcacccccgacggctccatgctgttccgagtaaccatcaacccc

SEQ ID NO: 1954 - protein, 158 aa, Artificial Sequence
  Synthetic
VFTLEDFVGDWEQTAAYNLDQVLEQGGVSSLFQNLAVSVTPIQRIVLSGENALKIDIHVIIPYEGLSADQMAQIEKIFKVVYPVDDHHFKVILHYGTLVIDGVTPNMICYFGRPYEGIAVFDGKKITVTGTLWNGNKIIDERLITPDGSMLFRVTINP

SEQ ID NO: 1955 - DNA, 474 bp, Artificial Sequence; identical to SEQ ID NO: 1783
  Synthetic

SEQ ID NO: 1956 - protein, 158 aa, Artificial Sequence; identical to SEQ ID NO: 1784
  Synthetic

SEQ ID NO: 1957 - DNA, 474 bp, Artificial Sequence
  Synthetic
gtcttcacactcgaagatttcgttggggactgggaacagacagccgcctacaacctggaccaagtccttgaacagggaggtgtgtccagtttgtttcagaatctcgccgtgtccgtaactccgatccaaaggattgtcctgagcggtgaaaatgccctgaagatcgacatccatgtcatcatcccgtatgaaggtctgagcgccgaccaaatggcccagatcgaaaaaatttttaaggtggtgtaccctgtggatgatcatcactttaaggtgatcctgcactatggcacactggtaatcgacggggttacgccgaacatgatcgagtatttcggacggccgtatgaaggcatcgccgtgttcgacggcaaaaagatcactgtaacagggaccctgtggaacggcaacaaaattatcgacgagcgcctgatcacccccgacggctccatgctgttccgagtaaccatcaacccc

SEQ ID NO: 1958 - protein, 158 aa, Artificial Sequence
  Synthetic
VFTLEDFVGDWEQTAAYNLDQVLEQGGVSSLFQNLAVSVTPIQRIVLSGENALKIDIHVIIPYEGLSADQMAQIEKIFKVVYPVDDHHFKVILHYGTLVIDGVTPNMIEYFGRPYEGIAVFDGKKITVTGTLWNGNKIIDERLITPDGSMLFRVTINP

SEQ ID NO: 1959 - DNA, 474 bp, Artificial Sequence
  Synthetic
gtcttcacactcgaagatttcgttggggactgggaacagacagccgcctacaacctggaccaagtccttgaacagggaggtgtgtccagtttgtttcagaatctcgccgtgtccgtaactccgatccaaaggattgtcctgagcggtgaaaatgccctgaagatcgacatccatgtcatcatcccgtatgaaggtctgagcgccgaccaaatggcccagatcgaaaaaatttttaaggtggtgtaccctgtggatgatcatcactttaaggtgatcctgcactatggcacactggtaatcgacggggttacgccgaacatgatcttctatttcggacggccgtatgaaggcatcgccgtgttcgacggcaaaaagatcactgtaacagggaccctgtggaacggcaacaaaattatcgacgagcgcctgatcacccccgacggctccatgctgttccgagtaaccatcaacccc

SEQ ID NO: 1960 - protein, 158 aa, Artificial Sequence
  Synthetic
VFTLEDFVGDWEQTAAYNLDQVLEQGGVSSLFQNLAVSVTPIQRIVLSGENALKIDIHVIIPYEGLSADQMAQIEKIFKVVYPVDDHHFKVILHYGTLVIDGVTPNMIFYFGRPYEGIAVFDGKKITVTGTLWNGNKIIDERLITPDGSMLFRVTINP

SEQ ID NO: 1961 - DNA, 474 bp, Artificial Sequence
  Synthetic
gtcttcacactcgaagatttcgttggggactgggaacagacagccgcctacaacctggaccaagtccttgaacagggaggtgtgtccagtttgtttcagaatctcgccgtgtccgtaactccgatccaaaggattgtcctgagcggtgaaaatgccctgaagatcgacatccatgtcatcatcccgtatgaaggtctgagcgccgaccaaatggcccagatcgaaaaaatttttaaggtggtgtaccctgtggatgatcatcactttaaggtgatcctgcactatggcacactggtaatcgacggggttacgccgaacatgatcggctatttcggacggccgtatgaaggcatcgccgtgttcgacggcaaaaagatcactgtaacagggaccctgtggaacggcaacaaaattatcgacgagcgcctgatcacccccgacggctccatgctgttccgagtaaccatcaacccc

SEQ ID NO: 1962 - protein, 158 aa, Artificial Sequence
  Synthetic
VFTLEDFVGDWEQTAAYNLDQVLEQGGVSSLFQNLAVSVTPIQRIVLSGENALKIDIHVIIPYEGLSADQMAQIEKIFKVVYPVDDHHFKVILHYGTLVIDGVTPNMIGYFGRPYEGIAVFDGKKITVTGTLWNGNKIIDERLITPDGSMLFRVTINP

SEQ ID NO: 1963 - DNA, 474 bp, Artificial Sequence
  Synthetic
gtcttcacactcgaagatttcgttggggactgggaacagacagccgcctacaacctggaccaagtccttgaacagggaggtgtgtccagtttgtttcagaatctcgccgtgtccgtaactccgatccaaaggattgtcctgagcggtgaaaatgccctgaagatcgacatccatgtcatcatcccgtatgaaggtctgagcgccgaccaaatggcccagatcgaaaaaatttttaaggtggtgtaccctgtggatgatcatcactttaaggtgatcctgcactatggcacactggtaatcgacggggttacgccgaacatgatccactatttcggacggccgtatgaaggcatcgccgtgttcgacggcaaaaagatcactgtaacagggaccctgtggaacggcaacaaaattatcgacgagcgcctgatcacccccgacggctccatgctgttccgagtaaccatcaacccc

SEQ ID NO: 1964 - protein, 158 aa, Artificial Sequence
  Synthetic
VFTLEDFVGDWEQTAAYNLDQVLEQGGVSSLFQNLAVSVTPIQRIVLSGENALKIDIHVIIPYEGLSADQMAQIEKIFKVVYPVDDHHFKVILHYGTLVIDGVTPNMIHYFGRPYEGIAVFDGKKITVTGTLWNGNKIIDERLITPDGSMLFRVTINP

SEQ ID NO: 1965 - DNA, 474 bp, Artificial Sequence
  Synthetic
gtcttcacactcgaagatttcgttggggactgggaacagacagccgcctacaacctggaccaagtccttgaacagggaggtgtgtccagtttgtttcagaatctcgccgtgtccgtaactccgatccaaaggattgtcctgagcggtgaaaatgccctgaagatcgacatccatgtcatcatcccgtatgaaggtctgagcgccgaccaaatggcccagatcgaaaaaatttttaaggtggtgtaccctgtggatgatcatcactttaaggtgatcctgcactatggcacactggtaatcgacggggttacgccgaacatgatcatctatttcggacggccgtatgaaggcatcgccgtgttcgacggcaaaaagatcactgtaacagggaccctgtggaacggcaacaaaattatcgacgagcgcctgatcacccccgacggctccatgctgttccgagtaaccatcaacccc

SEQ ID NO: 1966 - protein, 158 aa, Artificial Sequence
  Synthetic
VFTLEDFVGDWEQTAAYNLDQVLEQGGVSSLFQNLAVSVTPIQRIVLSGENALKIDIHVIIPYEGLSADQMAQIEKIFKVVYPVDDHHFKVILHYGTLVIDGVTPNMIIYFGRPYEGIAVFDGKKITVTGTLWNGNKIIDERLITPDGSMLFRVTINP

SEQ ID NO: 1967 - DNA, 474 bp, Artificial Sequence
  Synthetic
gtcttcacactcgaagatttcgttggggactgggaacagacagccgcctacaacctggaccaagtccttgaacagggaggtgtgtccagtttgtttcagaatctcgccgtgtccgtaactccgatccaaaggattgtcctgagcggtgaaaatgccctgaagatcgacatccatgtcatcatcccgtatgaaggtctgagcgccgaccaaatggcccagatcgaaaaaatttttaaggtggtgtaccctgtggatgatcatcactttaaggtgatcctgcactatggcacactggtaatcgacggggttacgccgaacatgatcaagtatttcggacggccgtatgaaggcatcgccgtgttcgacggcaaaaagatcactgtaacagggaccctgtggaacggcaacaaaattatcgacgagcgcctgatcacccccgacggctccatgctgttccgagtaaccatcaacccc

SEQ ID NO: 1968 - protein, 158 aa, Artificial Sequence
  Synthetic
VFTLEDFVGDWEQTAAYNLDQVLEQGGVSSLFQNLAVSVTPIQRIVLSGENALKIDIHVIIPYEGLSADQMAQIEKIFKVVYPVDDHHFKVILHYGTLVIDGVTPNMIKYFGRPYEGIAVFDGKKITVTGTLWNGNKIIDERLITPDGSMLFRVTINP

SEQ ID NO: 1969 - DNA, 474 bp, Artificial Sequence
  Synthetic
gtcttcacactcgaagatttcgttggggactgggaacagacagccgcctacaacctggaccaagtccttgaacagggaggtgtgtccagtttgtttcagaatctcgccgtgtccgtaactccgatccaaaggattgtcctgagcggtgaaaatgccctgaagatcgacatccatgtcatcatcccgtatgaaggtctgagcgccgaccaaatggcccagatcgaaaaaatttttaaggtggtgtaccctgtggatgatcatcactttaaggtgatcctgcactatggcacactggtaatcgacggggttacgccgaacatgatcctgtatttcggacggccgtatgaaggcatcgccgtgttcgacggcaaaaagatcactgtaacagggaccctgtggaacggcaacaaaattatcgacgagcgcctgatcacccccgacggctccatgctgttccgagtaaccatcaacccc

SEQ ID NO: 1970 - protein, 158 aa, Artificial Sequence
  Synthetic
VFTLEDFVGDWEQTAAYNLDQVLEQGGVSSLFQNLAVSVTPIQRIVLSGENALKIDIHVIIPYEGLSADQMAQIEKIFKVVYPVDDHHFKVILHYGTLVIDGVTPNMILYFGRPYEGIAVFDGKKITVTGTLWNGNKIIDERLITPDGSMLFRVTINP

SEQ ID NO: 1971 - DNA, 474 bp, Artificial Sequence
  Synthetic
gtcttcacactcgaagatttcgttggggactgggaacagacagccgcctacaacctggaccaagtccttgaacagggaggtgtgtccagtttgtttcagaatctcgccgtgtccgtaactccgatccaaaggattgtcctgagcggtgaaaatgccctgaagatcgacatccatgtcatcatcccgtatgaaggtctgagcgccgaccaaatggcccagatcgaaaaaatttttaaggtggtgtaccctgtggatgatcatcactttaaggtgatcctgcactatggcacactggtaatcgacggggttacgccgaacatgatcatgtatttcggacggccgtatgaaggcatcgccgtgttcgacggcaaaaagatcactgtaacagggaccctgtggaacggcaacaaaattatcgacgagcgcctgatcacccccgacggctccatgctgttccgagtaaccatcaacccc

SEQ ID NO: 1972 - protein, 158 aa, Artificial Sequence
  Synthetic
VFTLEDFVGDWEQTAAYNLDQVLEQGGVSSLFQNLAVSVTPIQRIVLSGENALKIDIHVIIPYEGLSADQMAQIEKIFKVVYPVDDHHFKVILHYGTLVIDGVTPNMIMYFGRPYEGIAVFDGKKITVTGTLWNGNKIIDERLITPDGSMLFRVTINP

SEQ ID NO: 1973 - DNA, 474 bp, Artificial Sequence
  Synthetic
gtcttcacactcgaagatttcgttggggactgggaacagacagccgcctacaacctggaccaagtccttgaacagggaggtgtgtccagtttgtttcagaatctcgccgtgtccgtaactccgatccaaaggattgtcctgagcggtgaaaatgccctgaagatcgacatccatgtcatcatcccgtatgaaggtctgagcgccgaccaaatggcccagatcgaaaaaatttttaaggtggtgtaccctgtggatgatcatcactttaaggtgatcctgcactatggcacactggtaatcgacggggttacgccgaacatgatcccctatttcggacggccgtatgaaggcatcgccgtgttcgacggcaaaaagatcactgtaacagggaccctgtggaacggcaacaaaattatcgacgagcgcctgatcacccccgacggctccatgctgttccgagtaaccatcaacccc

SEQ ID NO: 1974 - protein, 158 aa, Artificial Sequence
  Synthetic
VFTLEDFVGDWEQTAAYNLDQVLEQGGVSSLFQNLAVSVTPIQRIVLSGENALKIDIHVIIPYEGLSADQMAQIEKIFKVVYPVDDHHFKVILHYGTLVIDGVTPNMIPYFGRPYEGIAVFDGKKITVTGTLWNGNKIIDERLITPDGSMLFRVTINP

SEQ ID NO: 1975 - DNA, 474 bp, Artificial Sequence
  Synthetic
gtcttcacactcgaagatttcgttggggactgggaacagacagccgcctacaacctggaccaagtccttgaacagggaggtgtgtccagtttgtttcagaatctcgccgtgtccgtaactccgatccaaaggattgtcctgagcggtgaaaatgccctgaagatcgacatccatgtcatcatcccgtatgaaggtctgagcgccgaccaaatggcccagatcgaaaaaatttttaaggtggtgtaccctgtggatgatcatcactttaaggtgatcctgcactatggcacactggtaatcgacggggttacgccgaacatgatccagtatttcggacggccgtatgaaggcatcgccgtgttcgacggcaaaaagatcactgtaacagggaccctgtggaacggcaacaaaattatcgacgagcgcctgatcacccccgacggctccatgctgttccgagtaaccatcaacccc

SEQ ID NO: 1976 - protein, 158 aa, Artificial Sequence
  Synthetic
VFTLEDFVGDWEQTAAYNLDQVLEQGGVSSLFQNLAVSVTPIQRIVLSGENALKIDIHVIIPYEGLSADQMAQIEKIFKVVYPVDDHHFKVILHYGTLVIDGVTPNMIQYFGRPYEGIAVFDGKKITVTGTLWNGNKIIDERLITPDGSMLFRVTINP

SEQ ID NO: 1977 - DNA, 474 bp, Artificial Sequence
  Synthetic
gtcttcacactcgaagatttcgttggggactgggaacagacagccgcctacaacctggaccaagtccttgaacagggaggtgtgtccagtttgtttcagaatctcgccgtgtccgtaactccgatccaaaggattgtcctgagcggtgaaaatgccctgaagatcgacatccatgtcatcatcccgtatgaaggtctgagcgccgaccaaatggcccagatcgaaaaaatttttaaggtggtgtaccctgtggatgatcatcactttaaggtgatcctgcactatggcacactggtaatcgacggggttacgccgaacatgatccggtatttcggacggccgtatgaaggcatcgccgtgttcgacggcaaaaagatcactgtaacagggaccctgtggaacggcaacaaaattatcgacgagcgcctgatcacccccgacggctccatgctgttccgagtaaccatcaacccc

SEQ ID NO: 1978 - protein, 158 aa, Artificial Sequence
  Synthetic
VFTLEDFVGDWEQTAAYNLDQVLEQGGVSSLFQNLAVSVTPIQRIVLSGENALKIDIHVIIPYEGLSADQMAQIEKIFKVVYPVDDHHFKVILHYGTLVIDGVTPNMIRYFGRPYEGIAVFDGKKITVTGTLWNGNKIIDERLITPDGSMLFRVTINP

SEQ ID NO: 1979 - DNA, 474 bp, Artificial Sequence
  Synthetic
gtcttcacactcgaagatttcgttggggactgggaacagacagccgcctacaacctggaccaagtccttgaacagggaggtgtgtccagtttgtttcagaatctcgccgtgtccgtaactccgatccaaaggattgtcctgagcggtgaaaatgccctgaagatcgacatccatgtcatcatcccgtatgaaggtctgagcgccgaccaaatggcccagatcgaaaaaatttttaaggtggtgtaccctgtggatgatcatcactttaaggtgatcctgcactatggcacactggtaatcgacggggttacgccgaacatgatcagctatttcggacggccgtatgaaggcatcgccgtgttcgacggcaaaaagatcactgtaacagggaccctgtggaacggcaacaaaattatcgacgagcgcctgatcacccccgacggctccatgctgttccgagtaaccatcaacccc

SEQ ID NO: 1980 - protein, 158 aa, Artificial Sequence
  Synthetic
VFTLEDFVGDWEQTAAYNLDQVLEQGGVSSLFQNLAVSVTPIQRIVLSGENALKIDIHVIIPYEGLSADQMAQIEKIFKVVYPVDDHHFKVILHYGTLVIDGVTPNMISYFGRPYEGIAVFDGKKITVTGTLWNGNKIIDERLITPDGSMLFRVTINP

SEQ ID NO: 1981 - DNA, 474 bp, Artificial Sequence
  Synthetic
gtcttcacactcgaagatttcgttggggactgggaacagacagccgcctacaacctggaccaagtccttgaacagggaggtgtgtccagtttgtttcagaatctcgccgtgtccgtaactccgatccaaaggattgtcctgagcggtgaaaatgccctgaagatcgacatccatgtcatcatcccgtatgaaggtctgagcgccgaccaaatggcccagatcgaaaaaatttttaaggtggtgtaccctgtggatgatcatcactttaaggtgatcctgcactatggcacactggtaatcgacggggttacgccgaacatgatcacctatttcggacggccgtatgaaggcatcgccgtgttcgacggcaaaaagatcactgtaacagggaccctgtggaacggcaacaaaattatcgacgagcgcctgatcacccccgacggctccatgctgttccgagtaaccatcaacccc

SEQ ID NO: 1982 - protein, 158 aa, Artificial Sequence
  Synthetic
VFTLEDFVGDWEQTAAYNLDQVLEQGGVSSLFQNLAVSVTPIQRIVLSGENALKIDIHVIIPYEGLSADQMAQIEKIFKVVYPVDDHHFKVILHYGTLVIDGVTPNMITYFGRPYEGIAVFDGKKITVTGTLWNGNKIIDERLITPDGSMLFRVTINP

SEQ ID NO: 1983 - DNA, 474 bp, Artificial Sequence
  Synthetic
gtcttcacactcgaagatttcgttggggactgggaacagacagccgcctacaacctggaccaagtccttgaacagggaggtgtgtccagtttgtttcagaatctcgccgtgtccgtaactccgatccaaaggattgtcctgagcggtgaaaatgccctgaagatcgacatccatgtcatcatcccgtatgaaggtctgagcgccgaccaaatggcccagatcgaaaaaatttttaaggtggtgtaccctgtggatgatcatcactttaaggtgatcctgcactatggcacactggtaatcgacggggttacgccgaacatgatcgtgtatttcggacggccgtatgaaggcatcgccgtgttcgacggcaaaaagatcactgtaacagggaccctgtggaacggcaacaaaattatcgacgagcgcctgatcacccccgacggctccatgctgttccgagtaaccatcaacccc

SEQ ID NO: 1984 - protein, 158 aa, Artificial Sequence
  Synthetic
VFTLEDFVGDWEQTAAYNLDQVLEQGGVSSLFQNLAVSVTPIQRIVLSGENALKIDIHVIIPYEGLSADQMAQIEKIFKVVYPVDDHHFKVILHYGTLVIDGVTPNMIVYFGRPYEGIAVFDGKKITVTGTLWNGNKIIDERLITPDGSMLFRVTINP

SEQ ID NO: 1985 - DNA, 474 bp, Artificial Sequence
  Synthetic
gtcttcacactcgaagatttcgttggggactgggaacagacagccgcctacaacctggaccaagtccttgaacagggaggtgtgtccagtttgtttcagaatctcgccgtgtccgtaactccgatccaaaggattgtcctgagcggtgaaaatgccctgaagatcgacatccatgtcatcatcccgtatgaaggtctgagcgccgaccaaatggcccagatcgaaaaaatttttaaggtggtgtaccctgtggatgatcatcactttaaggtgatcctgcactatggcacactggtaatcgacggggttacgccgaacatgatctggtatttcggacggccgtatgaaggcatcgccgtgttcgacggcaaaaagatcactgtaacagggaccctgtggaacggcaacaaaattatcgacgagcgcctgatcacccccgacggctccatgctgttccgagtaaccatcaacccc

SEQ ID NO: 1986 - protein, 158 aa, Artificial Sequence
  Synthetic
VFTLEDFVGDWEQTAAYNLDQVLEQGGVSSLFQNLAVSVTPIQRIVLSGENALKIDIHVIIPYEGLSADQMAQIEKIFKVVYPVDDHHFKVILHYGTLVIDGVTPNMIWYFGRPYEGIAVFDGKKITVTGTLWNGNKIIDERLITPDGSMLFRVTINP

SEQ ID NO: 1987 - DNA, 474 bp, Artificial Sequence
  Synthetic
gtcttcacactcgaagatttcgttggggactgggaacagacagccgcctacaacctggaccaagtccttgaacagggaggtgtgtccagtttgtttcagaatctcgccgtgtccgtaactccgatccaaaggattgtcctgagcggtgaaaatgccctgaagatcgacatccatgtcatcatcccgtatgaaggtctgagcgccgaccaaatggcccagatcgaaaaaatttttaaggtggtgtaccctgtggatgatcatcactttaaggtgatcctgcactatggcacactggtaatcgacggggttacgccgaacatgatctactatttcggacggccgtatgaaggcatcgccgtgttcgacggcaaaaagatcactgtaacagggaccctgtggaacggcaacaaaattatcgacgagcgcctgatcacccccgacggctccatgctgttccgagtaaccatcaacccc

SEQ ID NO: 1988 - protein, 158 aa, Artificial Sequence
  Synthetic
VFTLEDFVGDWEQTAAYNLDQVLEQGGVSSLFQNLAVSVTPIQRIVLSGENALKIDIHVIIPYEGLSADQMAQIEKIFKVVYPVDDHHFKVILHYGTLVIDGVTPNMIYYFGRPYEGIAVFDGKKITVTGTLWNGNKIIDERLITPDGSMLFRVTINP

SEQ ID NO: 1989 - DNA, 474 bp, Artificial Sequence
  Synthetic
gtcttcacactcgaagatttcgttggggactgggaacagacagccgcctacaacctggaccaagtccttgaacagggaggtgtgtccagtttgtttcagaatctcgccgtgtccgtaactccgatccaaaggattgtcctgagcggtgaaaatgccctgaagatcgacatccatgtcatcatcccgtatgaaggtctgagcgccgaccaaatggcccagatcgaaaaaatttttaaggtggtgtaccctgtggatgatcatcactttaaggtgatcctgcactatggcacactggtaatcgacggggttacgccgaacatgatcaactatttcggacggccgtatgaaggcatcgccgtgttcgacggcaaaaagatcactgtaacagggaccctgtggaacggcaacaaaattatcgacgagcgcctgatcgcccccgacggctccatgctgttccgagtaaccatcaacccc

SEQ ID NO: 1990 - protein, 158 aa, Artificial Sequence
  Synthetic
VFTLEDFVGDWEQTAAYNLDQVLEQGGVSSLFQNLAVSVTPIQRIVLSGENALKIDIHVIIPYEGLSADQMAQIEKIFKVVYPVDDHHFKVILHYGTLVIDGVTPNMINYFGRPYEGIAVFDGKKITVTGTLWNGNKIIDERLIAPDGSMLFRVTINP

SEQ ID NO: 1991 - DNA, 474 bp, Artificial Sequence
  Synthetic
gtcttcacactcgaagatttcgttggggactgggaacagacagccgcctacaacctggaccaagtccttgaacagggaggtgtgtccagtttgtttcagaatctcgccgtgtccgtaactccgatccaaaggattgtcctgagcggtgaaaatgccctgaagatcgacatccatgtcatcatcccgtatgaaggtctgagcgccgaccaaatggcccagatcgaaaaaatttttaaggtggtgtaccctgtggatgatcatcactttaaggtgatcctgcactatggcacactggtaatcgacggggttacgccgaacatgatcaactatttcggacggccgtatgaaggcatcgccgtgttcgacggcaaaaagatcactgtaacagggaccctgtggaacggcaacaaaattatcgacgagcgcctgatctgccccgacggctccatgctgttccgagtaaccatcaacccc

SEQ ID NO: 1992 - protein, 158 aa, Artificial Sequence
  Synthetic
VFTLEDFVGDWEQTAAYNLDQVLEQGGVSSLFQNLAVSVTPIQRIVLSGENALKIDIHVIIPYEGLSADQMAQIEKIFKVVYPVDDHHFKVILHYGTLVIDGVTPNMINYFGRPYEGIAVFDGKKITVTGTLWNGNKIIDERLICPDGSMLFRVTINP

SEQ ID NO: 1993 - DNA, 474 bp, Artificial Sequence
  Synthetic
gtcttcacactcgaagatttcgttggggactgggaacagacagccgcctacaacctggaccaagtccttgaacagggaggtgtgtccagtttgtttcagaatctcgccgtgtccgtaactccgatccaaaggattgtcctgagcggtgaaaatgccctgaagatcgacatccatgtcatcatcccgtatgaaggtctgagcgccgaccaaatggcccagatcgaaaaaatttttaaggtggtgtaccctgtggatgatcatcactttaaggtgatcctgcactatggcacactggtaatcgacggggttacgccgaacatgatcaactatttcggacggccgtatgaaggcatcgccgtgttcgacggcaaaaagatcactgtaacagggaccctgtggaacggcaacaaaattatcgacgagcgcctgatcgaccccgacggctccatgctgttccgagtaaccatcaacccc

SEQ ID NO: 1994 - protein, 158 aa, Artificial Sequence
  Synthetic
VFTLEDFVGDWEQTAAYNLDQVLEQGGVSSLFQNLAVSVTPIQRIVLSGENALKIDIHVIIPYEGLSADQMAQIEKIFKVVYPVDDHHFKVILHYGTLVIDGVTPNMINYFGRPYEGIAVFDGKKITVTGTLWNGNKIIDERLIDPDGSMLFRVTINP

SEQ ID NO: 1995 - DNA, 474 bp, Artificial Sequence
  Synthetic
gtcttcacactcgaagatttcgttggggactgggaacagacagccgcctacaacctggaccaagtccttgaacagggaggtgtgtccagtttgtttcagaatctcgccgtgtccgtaactccgatccaaaggattgtcctgagcggtgaaaatgccctgaagatcgacatccatgtcatcatcccgtatgaaggtctgagcgccgaccaaatggcccagatcgaaaaaatttttaaggtggtgtaccctgtggatgatcatcactttaaggtgatcctgcactatggcacactggtaatcgacggggttacgccgaacatgatcaactatttcggacggccgtatgaaggcatcgccgtgttcgacggcaaaaagatcactgtaacagggaccctgtggaacggcaacaaaattatcgacgagcgcctgatcgagcccgacggctccatgctgttccgagtaaccatcaacccc

SEQ ID NO: 1996 - protein, 158 aa, Artificial Sequence
  Synthetic
VFTLEDFVGDWEQTAAYNLDQVLEQGGVSSLFQNLAVSVTPIQRIVLSGENALKIDIHVIIPYEGLSADQMAQIEKIFKVVYPVDDHHFKVILHYGTLVIDGVTPNMINYFGRPYEGIAVFDGKKITVTGTLWNGNKIIDERLIEPDGSMLFRVTINP

SEQ ID NO: 1997 - DNA, 474 bp, Artificial Sequence
  Synthetic
gtcttcacactcgaagatttcgttggggactgggaacagacagccgcctacaacctggaccaagtccttgaacagggaggtgtgtccagtttgtttcagaatctcgccgtgtccgtaactccgatccaaaggattgtcctgagcggtgaaaatgccctgaagatcgacatccatgtcatcatcccgtatgaaggtctgagcgccgaccaaatggcccagatcgaaaaaatttttaaggtggtgtaccctgtggatgatcatcactttaaggtgatcctgcactatggcacactggtaatcgacggggttacgccgaacatgatcaactatttcggacggccgtatgaaggcatcgccgtgttcgacggcaaaaagatcactgtaacagggaccctgtggaacggcaacaaaattatcgacgagcgcctgatcttccccgacggctccatgctgttccgagtaaccatcaacccc

SEQ ID NO: 1998 - protein, 158 aa, Artificial Sequence
  Synthetic
VFTLEDFVGDWEQTAAYNLDQVLEQGGVSSLFQNLAVSVTPIQRIVLSGENALKIDIHVIIPYEGLSADQMAQIEKIFKVVYPVDDHHFKVILHYGTLVIDGVTPNMINYFGRPYEGIAVFDGKKITVTGTLWNGNKIIDERLIFPDGSMLFRVTINP

SEQ ID NO: 1999 - DNA, 474 bp, Artificial Sequence
  Synthetic
gtcttcacactcgaagatttcgttggggactgggaacagacagccgcctacaacctggaccaagtccttgaacagggaggtgtgtccagtttgtttcagaatctcgccgtgtccgtaactccgatccaaaggattgtcctgagcggtgaaaatgccctgaagatcgacatccatgtcatcatcccgtatgaaggtctgagcgccgaccaaatggcccagatcgaaaaaatttttaaggtggtgtaccctgtggatgatcatcactttaaggtgatcctgcactatggcacactggtaatcgacggggttacgccgaacatgatcaactatttcggacggccgtatgaaggcatcgccgtgttcgacggcaaaaagatcactgtaacagggaccctgtggaacggcaacaaaattatcgacgagcgcctgatcggccccgacggctccatgctgttccgagtaaccatcaacccc

SEQ ID NO: 2000 - protein, 158 aa, Artificial Sequence
  Synthetic
VFTLEDFVGDWEQTAAYNLDQVLEQGGVSSLFQNLAVSVTPIQRIVLSGENALKIDIHVIIPYEGLSADQMAQIEKIFKVVYPVDDHHFKVILHYGTLVIDGVTPNMINYFGRPYEGIAVFDGKKITVTGTLWNGNKIIDERLIGPDGSMLFRVTINP

SEQ ID NO: 2001 - DNA, 474 bp, Artificial Sequence
  Synthetic
gtcttcacactcgaagatttcgttggggactgggaacagacagccgcctacaacctggaccaagtccttgaacagggaggtgtgtccagtttgtttcagaatctcgccgtgtccgtaactccgatccaaaggattgtcctgagcggtgaaaatgccctgaagatcgacatccatgtcatcatcccgtatgaaggtctgagcgccgaccaaatggcccagatcgaaaaaatttttaaggtggtgtaccctgtggatgatcatcactttaaggtgatcctgcactatggcacactggtaatcgacggggttacgccgaacatgatcaactatttcggacggccgtatgaaggcatcgccgtgttcgacggcaaaaagatcactgtaacagggaccctgtggaacggcaacaaaattatcgacgagcgcctgatccaccccgacggctccatgctgttccgagtaaccatcaacccc

SEQ ID NO: 2002 - protein, 158 aa, Artificial Sequence
  Synthetic
VFTLEDFVGDWEQTAAYNLDQVLEQGGVSSLFQNLAVSVTPIQRIVLSGENALKIDIHVIIPYEGLSADQMAQIEKIFKVVYPVDDHHFKVILHYGTLVIDGVTPNMINYFGRPYEGIAVFDGKKITVTGTLWNGNKIIDERLIHPDGSMLFRVTINP

SEQ ID NO: 2003 - DNA, 474 bp, Artificial Sequence
  Synthetic
gtcttcacactcgaagatttcgttggggactgggaacagacagccgcctacaacctggaccaagtccttgaacagggaggtgtgtccagtttgtttcagaatctcgccgtgtccgtaactccgatccaaaggattgtcctgagcggtgaaaatgccctgaagatcgacatccatgtcatcatcccgtatgaaggtctgagcgccgaccaaatggcccagatcgaaaaaatttttaaggtggtgtaccctgtggatgatcatcactttaaggtgatcctgcactatggcacactggtaatcgacggggttacgccgaacatgatcaactatttcggacggccgtatgaaggcatcgccgtgttcgacggcaaaaagatcactgtaacagggaccctgtggaacggcaacaaaattatcgacgagcgcctgatcatccccgacggctccatgctgttccgagtaaccatcaacccc

SEQ ID NO: 2004 - protein, 158 aa, Artificial Sequence
  Synthetic
VFTLEDFVGDWEQTAAYNLDQVLEQGGVSSLFQNLAVSVTPIQRIVLSGENALKIDIHVIIPYEGLSADQMAQIEKIFKVVYPVDDHHFKVILHYGTLVIDGVTPNMINYFGRPYEGIAVFDGKKITVTGTLWNGNKIIDERLIIPDGSMLFRVTINP

SEQ ID NO: 2005 - DNA, 474 bp, Artificial Sequence
  Synthetic
gtcttcacactcgaagatttcgttggggactgggaacagacagccgcctacaacctggaccaagtccttgaacagggaggtgtgtccagtttgtttcagaatctcgccgtgtccgtaactccgatccaaaggattgtcctgagcggtgaaaatgccctgaagatcgacatccatgtcatcatcccgtatgaaggtctgagcgccgaccaaatggcccagatcgaaaaaatttttaaggtggtgtaccctgtggatgatcatcactttaaggtgatcctgcactatggcacactggtaatcgacggggttacgccgaacatgatcaactatttcggacggccgtatgaaggcatcgccgtgttcgacggcaaaaagatcactgtaacagggaccctgtggaacggcaacaaaattatcgacgagcgcctgatcaagcccgacggctccatgctgttccgagtaaccatcaacccc

SEQ ID NO: 2006 - protein, 158 aa, Artificial Sequence
  Synthetic
VFTLEDFVGDWEQTAAYNLDQVLEQGGVSSLFQNLAVSVTPIQRIVLSGENALKIDIHVIIPYEGLSADQMAQIEKIFKVVYPVDDHHFKVILHYGTLVIDGVTPNMINYFGRPYEGIAVFDGKKITVTGTLWNGNKIIDERLIKPDGSMLFRVTINP

SEQ ID NO: 2007 - DNA, 474 bp, Artificial Sequence
  Synthetic
gtcttcacactcgaagatttcgttggggactgggaacagacagccgcctacaacctggaccaagtccttgaacagggaggtgtgtccagtttgtttcagaatctcgccgtgtccgtaactccgatccaaaggattgtcctgagcggtgaaaatgccctgaagatcgacatccatgtcatcatcccgtatgaaggtctgagcgccgaccaaatggcccagatcgaaaaaatttttaaggtggtgtaccctgtggatgatcatcactttaaggtgatcctgcactatggcacactggtaatcgacggggttacgccgaacatgatcaactatttcggacggccgtatgaaggcatcgccgtgttcgacggcaaaaagatcactgtaacagggaccctgtggaacggcaacaaaattatcgacgagcgcctgatcctgcccgacggctccatgctgttccgagtaaccatcaacccc

SEQ ID NO: 2008 - protein, 158 aa, Artificial Sequence
  Synthetic
VFTLEDFVGDWEQTAAYNLDQVLEQGGVSSLFQNLAVSVTPIQRIVLSGENALKIDIHVIIPYEGLSADQMAQIEKIFKVVYPVDDHHFKVILHYGTLVIDGVTPNMINYFGRPYEGIAVFDGKKITVTGTLWNGNKIIDERLILPDGSMLFRVTINP

SEQ ID NO: 2009 - DNA, 474 bp, Artificial Sequence
  Synthetic
gtcttcacactcgaagatttcgttggggactgggaacagacagccgcctacaacctggaccaagtccttgaacagggaggtgtgtccagtttgtttcagaatctcgccgtgtccgtaactccgatccaaaggattgtcctgagcggtgaaaatgccctgaagatcgacatccatgtcatcatcccgtatgaaggtctgagcgccgaccaaatggcccagatcgaaaaaatttttaaggtggtgtaccctgtggatgatcatcactttaaggtgatcctgcactatggcacactggtaatcgacggggttacgccgaacatgatcaactatttcggacggccgtatgaaggcatcgccgtgttcgacggcaaaaagatcactgtaacagggaccctgtggaacggcaacaaaattatcgacgagcgcctgatcatgcccgacggctccatgctgttccgagtaaccatcaacccc

SEQ ID NO: 2010 - protein, 158 aa, Artificial Sequence
  Synthetic
VFTLEDFVGDWEQTAAYNLDQVLEQGGVSSLFQNLAVSVTPIQRIVLSGENALKIDIHVIIPYEGLSADQMAQIEKIFKVVYPVDDHHFKVILHYGTLVIDGVTPNMINYFGRPYEGIAVFDGKKITVTGTLWNGNKIIDERLIMPDGSMLFRVTINP

SEQ ID NO: 2011 - DNA, 474 bp, Artificial Sequence; identical to SEQ ID NO: 1781
  Synthetic

SEQ ID NO: 2012 - protein, 158 aa, Artificial Sequence; identical to SEQ ID NO: 1782
  Synthetic

SEQ ID NO: 2013 - DNA, 474 bp, Artificial Sequence
  Synthetic
gtcttcacactcgaagatttcgttggggactgggaacagacagccgcctacaacctggaccaagtccttgaacagggaggtgtgtccagtttgtttcagaatctcgccgtgtccgtaactccgatccaaaggattgtcctgagcggtgaaaatgccctgaagatcgacatccatgtcatcatcccgtatgaaggtctgagcgccgaccaaatggcccagatcgaaaaaatttttaaggtggtgtaccctgtggatgatcatcactttaaggtgatcctgcactatggcacactggtaatcgacggggttacgccgaacatgatcaactatttcggacggccgtatgaaggcatcgccgtgttcgacggcaaaaagatcactgtaacagggaccctgtggaacggcaacaaaattatcgacgagcgcctgatcccccccgacggctccatgctgttccgagtaaccatcaacccc

SEQ ID NO: 2014 - protein, 158 aa, Artificial Sequence
  Synthetic
VFTLEDFVGDWEQTAAYNLDQVLEQGGVSSLFQNLAVSVTPIQRIVLSGENALKIDIHVIIPYEGLSADQMAQIEKIFKVVYPVDDHHFKVILHYGTLVIDGVTPNMINYFGRPYEGIAVFDGKKITVTGTLWNGNKIIDERLIPPDGSMLFRVTINP

SEQ ID NO: 2015 - DNA, 474 bp, Artificial Sequence
  Synthetic
gtcttcacactcgaagatttcgttggggactgggaacagacagccgcctacaacctggaccaagtccttgaacagggaggtgtgtccagtttgtttcagaatctcgccgtgtccgtaactccgatccaaaggattgtcctgagcggtgaaaatgccctgaagatcgacatccatgtcatcatcccgtatgaaggtctgagcgccgaccaaatggcccagatcgaaaaaatttttaaggtggtgtaccctgtggatgatcatcactttaaggtgatcctgcactatggcacactggtaatcgacggggttacgccgaacatgatcaactatttcggacggccgtatgaaggcatcgccgtgttcgacggcaaaaagatcactgtaacagggaccctgtggaacggcaacaaaattatcgacgagcgcctgatccagcccgacggctccatgctgttccgagtaaccatcaacccc

SEQ ID NO: 2016 - protein, 158 aa, Artificial Sequence
  Synthetic
VFTLEDFVGDWEQTAAYNLDQVLEQGGVSSLFQNLAVSVTPIQRIVLSGENALKIDIHVIIPYEGLSADQMAQIEKIFKVVYPVDDHHFKVILHYGTLVIDGVTPNMINYFGRPYEGIAVFDGKKITVTGTLWNGNKIIDERLIQPDGSMLFRVTINP

SEQ ID NO: 2017 - DNA, 474 bp, Artificial Sequence
  Synthetic
gtcttcacactcgaagatttcgttggggactgggaacagacagccgcctacaacctggaccaagtccttgaacagggaggtgtgtccagtttgtttcagaatctcgccgtgtccgtaactccgatccaaaggattgtcctgagcggtgaaaatgccctgaagatcgacatccatgtcatcatcccgtatgaaggtctgagcgccgaccaaatggcccagatcgaaaaaatttttaaggtggtgtaccctgtggatgatcatcactttaaggtgatcctgcactatggcacactggtaatcgacggggttacgccgaacatgatcaactatttcggacggccgtatgaaggcatcgccgtgttcgacggcaaaaagatcactgtaacagggaccctgtggaacggcaacaaaattatcgacgagcgcctgatccggcccgacggctccatgctgttccgagtaaccatcaacccc

SEQ ID NO: 2018 - protein, 158 aa, Artificial Sequence
  Synthetic
VFTLEDFVGDWEQTAAYNLDQVLEQGGVSSLFQNLAVSVTPIQRIVLSGENALKIDIHVIIPYEGLSADQMAQIEKIFKVVYPVDDHHFKVILHYGTLVIDGVTPNMINYFGRPYEGIAVFDGKKITVTGTLWNGNKIIDERLIRPDGSMLFRVTINP

SEQ ID NO: 2019 - DNA, 474 bp, Artificial Sequence
  Synthetic
gtcttcacactcgaagatttcgttggggactgggaacagacagccgcctacaacctggaccaagtccttgaacagggaggtgtgtccagtttgtttcagaatctcgccgtgtccgtaactccgatccaaaggattgtcctgagcggtgaaaatgccctgaagatcgacatccatgtcatcatcccgtatgaaggtctgagcgccgaccaaatggcccagatcgaaaaaatttttaaggtggtgtaccctgtggatgatcatcactttaaggtgatcctgcactatggcacactggtaatcgacggggttacgccgaacatgatcaactatttcggacggccgtatgaaggcatcgccgtgttcgacggcaaaaagatcactgtaacagggaccctgtggaacggcaacaaaattatcgacgagcgcctgatcagccccgacggctccatgctgttccgagtaaccatcaacccc

SEQ ID NO: 2020 - protein, 158 aa, Artificial Sequence
  Synthetic
VFTLEDFVGDWEQTAAYNLDQVLEQGGVSSLFQNLAVSVTPIQRIVLSGENALKIDIHVIIPYEGLSADQMAQIEKIFKVVYPVDDHHFKVILHYGTLVIDGVTPNMINYFGRPYEGIAVFDGKKITVTGTLWNGNKIIDERLISPDGSMLFRVTINP

SEQ ID NO: 2021 - DNA, 474 bp, Artificial Sequence
  Synthetic
gtcttcacactcgaagatttcgttggggactgggaacagacagccgcctacaacctggaccaagtccttgaacagggaggtgtgtccagtttgtttcagaatctcgccgtgtccgtaactccgatccaaaggattgtcctgagcggtgaaaatgccctgaagatcgacatccatgtcatcatcccgtatgaaggtctgagcgccgaccaaatggcccagatcgaaaaaatttttaaggtggtgtaccctgtggatgatcatcactttaaggtgatcctgcactatggcacactggtaatcgacggggttacgccgaacatgatcaactatttcggacggccgtatgaaggcatcgccgtgttcgacggcaaaaagatcactgtaacagggaccctgtggaacggcaacaaaattatcgacgagcgcctgatcgtgcccgacggctccatgctgttccgagtaaccatcaacccc

SEQ ID NO: 2022 - protein, 158 aa, Artificial Sequence
  Synthetic
VFTLEDFVGDWEQTAAYNLDQVLEQGGVSSLFQNLAVSVTPIQRIVLSGENALKIDIHVIIPYEGLSADQMAQIEKIFKVVYPVDDHHFKVILHYGTLVIDGVTPNMINYFGRPYEGIAVFDGKKITVTGTLWNGNKIIDERLIVPDGSMLFRVTINP

SEQ ID NO: 2023 - DNA, 474 bp, Artificial Sequence
  Synthetic
gtcttcacactcgaagatttcgttggggactgggaacagacagccgcctacaacctggaccaagtccttgaacagggaggtgtgtccagtttgtttcagaatctcgccgtgtccgtaactccgatccaaaggattgtcctgagcggtgaaaatgccctgaagatcgacatccatgtcatcatcccgtatgaaggtctgagcgccgaccaaatggcccagatcgaaaaaatttttaaggtggtgtaccctgtggatgatcatcactttaaggtgatcctgcactatggcacactggtaatcgacggggttacgccgaacatgatcaactatttcggacggccgtatgaaggcatcgccgtgttcgacggcaaaaagatcactgtaacagggaccctgtggaacggcaacaaaattatcgacgagcgcctgatctggcccgacggctccatgctgttccgagtaaccatcaacccc

SEQ ID NO: 2024 - protein, 158 aa, Artificial Sequence
  Synthetic
VFTLEDFVGDWEQTAAYNLDQVLEQGGVSSLFQNLAVSVTPIQRIVLSGENALKIDIHVIIPYEGLSADQMAQIEKIFKVVYPVDDHHFKVILHYGTLVIDGVTPNMINYFGRPYEGIAVFDGKKITVTGTLWNGNKIIDERLIWPDGSMLFRVTINP

SEQ ID NO: 2025 - DNA, 474 bp, Artificial Sequence
  Synthetic
gtcttcacactcgaagatttcgttggggactgggaacagacagccgcctacaacctggaccaagtccttgaacagggaggtgtgtccagtttgtttcagaatctcgccgtgtccgtaactccgatccaaaggattgtcctgagcggtgaaaatgccctgaagatcgacatccatgtcatcatcccgtatgaaggtctgagcgccgaccaaatggcccagatcgaaaaaatttttaaggtggtgtaccctgtggatgatcatcactttaaggtgatcctgcactatggcacactggtaatcgacggggttacgccgaacatgatcaactatttcggacggccgtatgaaggcatcgccgtgttcgacggcaaaaagatcactgtaacagggaccctgtggaacggcaacaaaattatcgacgagcgcctgatctaccccgacggctccatgctgttccgagtaaccatcaacccc

SEQ ID NO: 2026 - protein, 158 aa, Artificial Sequence
  Synthetic
VFTLEDFVGDWEQTAAYNLDQVLEQGGVSSLFQNLAVSVTPIQRIVLSGENALKIDIHVIIPYEGLSADQMAQIEKIFKVVYPVDDHHFKVILHYGTLVIDGVTPNMINYFGRPYEGIAVFDGKKITVTGTLWNGNKIIDERLIYPDGSMLFRVTINP

SEQ ID NO: 2027 - DNA, 474 bp, Artificial Sequence
  Synthetic
gtcttcacactcgaagatttcgttggggactgggaacagacagccgcctacaacctggaccaagtccttgaacagggaggtgtgtccagtttgtttcagaatctcgccgtgtccgtaactccgatccaaaggattgtcctgagcggtgaaaatgccctgaagatcgacatccatgtcatcatcccgtatgaaggtctgagcgccgaccaaatggcccagatcgaaaaaatttttaaggtggtgtaccctgtggatgatcatcactttaaggtgatcctgcactatggcacactggtaatcgacggggttacgccgaacatgatcaactatttcggacggccgtatgaaggcatcgccgtgttcgacggcaaaaagatcactgtaacagggaccctgtggaacggcaacaaaattatcgacgagcgcctgatcacccccgacggctccatgctgttccgagtaaccatcaacgcc

SEQ ID NO: 2028 - protein, 158 aa, Artificial Sequence
  Synthetic
VFTLEDFVGDWEQTAAYNLDQVLEQGGVSSLFQNLAVSVTPIQRIVLSGENALKIDIHVIIPYEGLSADQMAQIEKIFKVVYPVDDHHFKVILHYGTLVIDGVTPNMINYFGRPYEGIAVFDGKKITVTGTLWNGNKIIDERLITPDGSMLFRVTINA

SEQ ID NO: 2029 - DNA, 474 bp, Artificial Sequence
  Synthetic
gtcttcacactcgaagatttcgttggggactgggaacagacagccgcctacaacctggaccaagtccttgaacagggaggtgtgtccagtttgtttcagaatctcgccgtgtccgtaactccgatccaaaggattgtcctgagcggtgaaaatgccctgaagatcgacatccatgtcatcatcccgtatgaaggtctgagcgccgaccaaatggcccagatcgaaaaaatttttaaggtggtgtaccctgtggatgatcatcactttaaggtgatcctgcactatggcacactggtaatcgacggggttacgccgaacatgatcaactatttcggacggccgtatgaaggcatcgccgtgttcgacggcaaaaagatcactgtaacagggaccctgtggaacggcaacaaaattatcgacgagcgcctgatcacccccgacggctccatgctgttccgagtaaccatcaactgc

SEQ ID NO: 2030 - protein, 158 aa, Artificial Sequence
  Synthetic
VFTLEDFVGDWEQTAAYNLDQVLEQGGVSSLFQNLAVSVTPIQRIVLSGENALKIDIHVIIPYEGLSADQMAQIEKIFKVVYPVDDHHFKVILHYGTLVIDGVTPNMINYFGRPYEGIAVFDGKKITVTGTLWNGNKIIDERLITPDGSMLFRVTINC

SEQ ID NO: 2031 - DNA, 474 bp, Artificial Sequence
  Synthetic
gtcttcacactcgaagatttcgttggggactgggaacagacagccgcctacaacctggaccaagtccttgaacagggaggtgtgtccagtttgtttcagaatctcgccgtgtccgtaactccgatccaaaggattgtcctgagcggtgaaaatgccctgaagatcgacatccatgtcatcatcccgtatgaaggtctgagcgccgaccaaatggcccagatcgaaaaaatttttaaggtggtgtaccctgtggatgatcatcactttaaggtgatcctgcactatggcacactggtaatcgacggggttacgccgaacatgatcaactatttcggacggccgtatgaaggcatcgccgtgttcgacggcaaaaagatcactgtaacagggaccctgtggaacggcaacaaaattatcgacgagcgcctgatcacccccgacggctccatgctgttccgagtaaccatcaacgac

SEQ ID NO: 2032 - protein, 158 aa, Artificial Sequence
  Synthetic
VFTLEDFVGDWEQTAAYNLDQVLEQGGVSSLFQNLAVSVTPIQRIVLSGENALKIDIHVIIPYEGLSADQMAQIEKIFKVVYPVDDHHFKVILHYGTLVIDGVTPNMINYFGRPYEGIAVFDGKKITVTGTLWNGNKIIDERLITPDGSMLFRVTIND

SEQ ID NO: 2033 - DNA, 474 bp, Artificial Sequence; identical to SEQ ID NO: 1795
  Synthetic

SEQ ID NO: 2034 - protein, 158 aa, Artificial Sequence; identical to SEQ ID NO: 1796
  Synthetic

SEQ ID NO: 2035 - DNA, 474 bp, Artificial Sequence
  Synthetic
gtcttcacactcgaagatttcgttggggactgggaacagacagccgcctacaacctggaccaagtccttgaacagggaggtgtgtccagtttgtttcagaatctcgccgtgtccgtaactccgatccaaaggattgtcctgagcggtgaaaatgccctgaagatcgacatccatgtcatcatcccgtatgaaggtctgagcgccgaccaaatggcccagatcgaaaaaatttttaaggtggtgtaccctgtggatgatcatcactttaaggtgatcctgcactatggcacactggtaatcgacggggttacgccgaacatgatcaactatttcggacggccgtatgaaggcatcgccgtgttcgacggcaaaaagatcactgtaacagggaccctgtggaacggcaacaaaattatcgacgagcgcctgatcacccccgacggctccatgctgttccgagtaaccatcaacttc

SEQ ID NO: 2036 - protein, 158 aa, Artificial Sequence
  Synthetic
VFTLEDFVGDWEQTAAYNLDQVLEQGGVSSLFQNLAVSVTPIQRIVLSGENALKIDIHVIIPYEGLSADQMAQIEKIFKVVYPVDDHHFKVILHYGTLVIDGVTPNMINYFGRPYEGIAVFDGKKITVTGTLWNGNKIIDERLITPDGSMLFRVTINF

SEQ ID NO: 2037 - DNA, 474 bp, Artificial Sequence
  Synthetic
gtcttcacactcgaagatttcgttggggactgggaacagacagccgcctacaacctggaccaagtccttgaacagggaggtgtgtccagtttgtttcagaatctcgccgtgtccgtaactccgatccaaaggattgtcctgagcggtgaaaatgccctgaagatcgacatccatgtcatcatcccgtatgaaggtctgagcgccgaccaaatggcccagatcgaaaaaatttttaaggtggtgtaccctgtggatgatcatcactttaaggtgatcctgcactatggcacactggtaatcgacggggttacgccgaacatgatcaactatttcggacggccgtatgaaggcatcgccgtgttcgacggcaaaaagatcactgtaacagggaccctgtggaacggcaacaaaattatcgacgagcgcctgatcacccccgacggctccatgctgttccgagtaaccatcaacggc

SEQ ID NO: 2038 - protein, 158 aa, Artificial Sequence
  Synthetic
VFTLEDFVGDWEQTAAYNLDQVLEQGGVSSLFQNLAVSVTPIQRIVLSGENALKIDIHVIIPYEGLSADQMAQIEKIFKVVYPVDDHHFKVILHYGTLVIDGVTPNMINYFGRPYEGIAVFDGKKITVTGTLWNGNKIIDERLITPDGSMLFRVTING

SEQ ID NO: 2039 - DNA, 474 bp, Artificial Sequence
  Synthetic
gtcttcacactcgaagatttcgttggggactgggaacagacagccgcctacaacctggaccaagtccttgaacagggaggtgtgtccagtttgtttcagaatctcgccgtgtccgtaactccgatccaaaggattgtcctgagcggtgaaaatgccctgaagatcgacatccatgtcatcatcccgtatgaaggtctgagcgccgaccaaatggcccagatcgaaaaaatttttaaggtggtgtaccctgtggatgatcatcactttaaggtgatcctgcactatggcacactggtaatcgacggggttacgccgaacatgatcaactatttcggacggccgtatgaaggcatcgccgtgttcgacggcaaaaagatcactgtaacagggaccctgtggaacggcaacaaaattatcgacgagcgcctgatcacccccgacggctccatgctgttccgagtaaccatcaaccac

SEQ ID NO: 2040 - protein, 158 aa, Artificial Sequence
  Synthetic
VFTLEDFVGDWEQTAAYNLDQVLEQGGVSSLFQNLAVSVTPIQRIVLSGENALKIDIHVIIPYEGLSADQMAQIEKIFKVVYPVDDHHFKVILHYGTLVIDGVTPNMINYFGRPYEGIAVFDGKKITVTGTLWNGNKIIDERLITPDGSMLFRVTINH

SEQ ID NO: 2041 - DNA, 474 bp, Artificial Sequence
  Synthetic
gtcttcacactcgaagatttcgttggggactgggaacagacagccgcctacaacctggaccaagtccttgaacagggaggtgtgtccagtttgtttcagaatctcgccgtgtccgtaactccgatccaaaggattgtcctgagcggtgaaaatgccctgaagatcgacatccatgtcatcatcccgtatgaaggtctgagcgccgaccaaatggcccagatcgaaaaaatttttaaggtggtgtaccctgtggatgatcatcactttaaggtgatcctgcactatggcacactggtaatcgacggggttacgccgaacatgatcaactatttcggacggccgtatgaaggcatcgccgtgttcgacggcaaaaagatcactgtaacagggaccctgtggaacggcaacaaaattatcgacgagcgcctgatcacccccgacggctccatgctgttccgagtaaccatcaacatc

SEQ ID NO: 2042 - protein, 158 aa, Artificial Sequence
  Synthetic
VFTLEDFVGDWEQTAAYNLDQVLEQGGVSSLFQNLAVSVTPIQRIVLSGENALKIDIHVIIPYEGLSADQMAQIEKIFKVVYPVDDHHFKVILHYGTLVIDGVTPNMINYFGRPYEGIAVFDGKKITVTGTLWNGNKIIDERLITPDGSMLFRVTINI

SEQ ID NO: 2043 - DNA, 474 bp, Artificial Sequence
  Synthetic
gtcttcacactcgaagatttcgttggggactgggaacagacagccgcctacaacctggaccaagtccttgaacagggaggtgtgtccagtttgtttcagaatctcgccgtgtccgtaactccgatccaaaggattgtcctgagcggtgaaaatgccctgaagatcgacatccatgtcatcatcccgtatgaaggtctgagcgccgaccaaatggcccagatcgaaaaaatttttaaggtggtgtaccctgtggatgatcatcactttaaggtgatcctgcactatggcacactggtaatcgacggggttacgccgaacatgatcaactatttcggacggccgtatgaaggcatcgccgtgttcgacggcaaaaagatcactgtaacagggaccctgtggaacggcaacaaaattatcgacgagcgcctgatcacccccgacggctccatgctgttccgagtaaccatcaacaag

SEQ ID NO: 2044 - protein, 158 aa, Artificial Sequence
  Synthetic
VFTLEDFVGDWEQTAAYNLDQVLEQGGVSSLFQNLAVSVTPIQRIVLSGENALKIDIHVIIPYEGLSADQMAQIEKIFKVVYPVDDHHFKVILHYGTLVIDGVTPNMINYFGRPYEGIAVFDGKKITVTGTLWNGNKIIDERLITPDGSMLFRVTINK

SEQ ID NO: 2045 - DNA, 474 bp, Artificial Sequence
  Synthetic
gtcttcacactcgaagatttcgttggggactgggaacagacagccgcctacaacctggaccaagtccttgaacagggaggtgtgtccagtttgtttcagaatctcgccgtgtccgtaactccgatccaaaggattgtcctgagcggtgaaaatgccctgaagatcgacatccatgtcatcatcccgtatgaaggtctgagcgccgaccaaatggcccagatcgaaaaaatttttaaggtggtgtaccctgtggatgatcatcactttaaggtgatcctgcactatggcacactggtaatcgacggggttacgccgaacatgatcaactatttcggacggccgtatgaaggcatcgccgtgttcgacggcaaaaagatcactgtaacagggaccctgtggaacggcaacaaaattatcgacgagcgcctgatcacccccgacggctccatgctgttccgagtaaccatcaacctg

SEQ ID NO: 2046 - protein, 158 aa, Artificial Sequence
  Synthetic
VFTLEDFVGDWEQTAAYNLDQVLEQGGVSSLFQNLAVSVTPIQRIVLSGENALKIDIHVIIPYEGLSADQMAQIEKIFKVVYPVDDHHFKVILHYGTLVIDGVTPNMINYFGRPYEGIAVFDGKKITVTGTLWNGNKIIDERLITPDGSMLFRVTINL

SEQ ID NO: 2047 - DNA, 474 bp, Artificial Sequence
  Synthetic
gtcttcacactcgaagatttcgttggggactgggaacagacagccgcctacaacctggaccaagtccttgaacagggaggtgtgtccagtttgtttcagaatctcgccgtgtccgtaactccgatccaaaggattgtcctgagcggtgaaaatgccctgaagatcgacatccatgtcatcatcccgtatgaaggtctgagcgccgaccaaatggcccagatcgaaaaaatttttaaggtggtgtaccctgtggatgatcatcactttaaggtgatcctgcactatggcacactggtaatcgacggggttacgccgaacatgatcaactatttcggacggccgtatgaaggcatcgccgtgttcgacggcaaaaagatcactgtaacagggaccctgtggaacggcaacaaaattatcgacgagcgcctgatcacccccgacggctccatgctgttccgagtaaccatcaacatg

SEQ ID NO: 2048 - protein, 158 aa, Artificial Sequence
  Synthetic
VFTLEDFVGDWEQTAAYNLDQVLEQGGVSSLFQNLAVSVTPIQRIVLSGENALKIDIHVIIPYEGLSADQMAQIEKIFKVVYPVDDHHFKVILHYGTLVIDGVTPNMINYFGRPYEGIAVFDGKKITVTGTLWNGNKIIDERLITPDGSMLFRVTINM

SEQ ID NO: 2049 - DNA, 474 bp, Artificial Sequence
  Synthetic
gtcttcacactcgaagatttcgttggggactgggaacagacagccgcctacaacctggaccaagtccttgaacagggaggtgtgtccagtttgtttcagaatctcgccgtgtccgtaactccgatccaaaggattgtcctgagcggtgaaaatgccctgaagatcgacatccatgtcatcatcccgtatgaaggtctgagcgccgaccaaatggcccagatcgaaaaaatttttaaggtggtgtaccctgtggatgatcatcactttaaggtgatcctgcactatggcacactggtaatcgacggggttacgccgaacatgatcaactatttcggacggccgtatgaaggcatcgccgtgttcgacggcaaaaagatcactgtaacagggaccctgtggaacggcaacaaaattatcgacgagcgcctgatcacccccgacggctccatgctgttccgagtaaccatcaacaac

SEQ ID NO: 2050 - protein, 158 aa, Artificial Sequence
  Synthetic
VFTLEDFVGDWEQTAAYNLDQVLEQGGVSSLFQNLAVSVTPIQRIVLSGENALKIDIHVIIPYEGLSADQMAQIEKIFKVVYPVDDHHFKVILHYGTLVIDGVTPNMINYFGRPYEGIAVFDGKKITVTGTLWNGNKIIDERLITPDGSMLFRVTINN

SEQ ID NO: 2051 - DNA, 474 bp, Artificial Sequence
  Synthetic
gtcttcacactcgaagatttcgttggggactgggaacagacagccgcctacaacctggaccaagtccttgaacagggaggtgtgtccagtttgtttcagaatctcgccgtgtccgtaactccgatccaaaggattgtcctgagcggtgaaaatgccctgaagatcgacatccatgtcatcatcccgtatgaaggtctgagcgccgaccaaatggcccagatcgaaaaaatttttaaggtggtgtaccctgtggatgatcatcactttaaggtgatcctgcactatggcacactggtaatcgacggggttacgccgaacatgatcaactatttcggacggccgtatgaaggcatcgccgtgttcgacggcaaaaagatcactgtaacagggaccctgtggaacggcaacaaaattatcgacgagcgcctgatcacccccgacggctccatgctgttccgagtaaccatcaaccag

SEQ ID NO: 2052 - protein, 158 aa, Artificial Sequence
  Synthetic
VFTLEDFVGDWEQTAAYNLDQVLEQGGVSSLFQNLAVSVTPIQRIVLSGENALKIDIHVIIPYEGLSADQMAQIEKIFKVVYPVDDHHFKVILHYGTLVIDGVTPNMINYFGRPYEGIAVFDGKKITVTGTLWNGNKIIDERLITPDGSMLFRVTINQ

SEQ ID NO: 2053 - DNA, 474 bp, Artificial Sequence
  Synthetic
gtcttcacactcgaagatttcgttggggactgggaacagacagccgcctacaacctggaccaagtccttgaacagggaggtgtgtccagtttgtttcagaatctcgccgtgtccgtaactccgatccaaaggattgtcctgagcggtgaaaatgccctgaagatcgacatccatgtcatcatcccgtatgaaggtctgagcgccgaccaaatggcccagatcgaaaaaatttttaaggtggtgtaccctgtggatgatcatcactttaaggtgatcctgcactatggcacactggtaatcgacggggttacgccgaacatgatcaactatttcggacggccgtatgaaggcatcgccgtgttcgacggcaaaaagatcactgtaacagggaccctgtggaacggcaacaaaattatcgacgagcgcctgatcacccccgacggctccatgctgttccgagtaaccatcaaccgg

SEQ ID NO: 2054 - protein, 158 aa, Artificial Sequence
  Synthetic
VFTLEDFVGDWEQTAAYNLDQVLEQGGVSSLFQNLAVSVTPIQRIVLSGENALKIDIHVIIPYEGLSADQMAQIEKIFKVVYPVDDHHFKVILHYGTLVIDGVTPNMINYFGRPYEGIAVFDGKKITVTGTLWNGNKIIDERLITPDGSMLFRVTINR

SEQ ID NO: 2055 - DNA, 474 bp, Artificial Sequence
  Synthetic
gtcttcacactcgaagatttcgttggggactgggaacagacagccgcctacaacctggaccaagtccttgaacagggaggtgtgtccagtttgtttcagaatctcgccgtgtccgtaactccgatccaaaggattgtcctgagcggtgaaaatgccctgaagatcgacatccatgtcatcatcccgtatgaaggtctgagcgccgaccaaatggcccagatcgaaaaaatttttaaggtggtgtaccctgtggatgatcatcactttaaggtgatcctgcactatggcacactggtaatcgacggggttacgccgaacatgatcaactatttcggacggccgtatgaaggcatcgccgtgttcgacggcaaaaagatcactgtaacagggaccctgtggaacggcaacaaaattatcgacgagcgcctgatcacccccgacggctccatgctgttccgagtaaccatcaacagc

SEQ ID NO: 2056 - protein, 158 aa, Artificial Sequence
  Synthetic
VFTLEDFVGDWEQTAAYNLDQVLEQGGVSSLFQNLAVSVTPIQRIVLSGENALKIDIHVIIPYEGLSADQMAQIEKIFKVVYPVDDHHFKVILHYGTLVIDGVTPNMINYFGRPYEGIAVFDGKKITVTGTLWNGNKIIDERLITPDGSMLFRVTINS

SEQ ID NO: 2057 - DNA, 474 bp, Artificial Sequence
  Synthetic
gtcttcacactcgaagatttcgttggggactgggaacagacagccgcctacaacctggaccaagtccttgaacagggaggtgtgtccagtttgtttcagaatctcgccgtgtccgtaactccgatccaaaggattgtcctgagcggtgaaaatgccctgaagatcgacatccatgtcatcatcccgtatgaaggtctgagcgccgaccaaatggcccagatcgaaaaaatttttaaggtggtgtaccctgtggatgatcatcactttaaggtgatcctgcactatggcacactggtaatcgacggggttacgccgaacatgatcaactatttcggacggccgtatgaaggcatcgccgtgttcgacggcaaaaagatcactgtaacagggaccctgtggaacggcaacaaaattatcgacgagcgcctgatcacccccgacggctccatgctgttccgagtaaccatcaacacc

SEQ ID NO: 2058 - protein, 158 aa, Artificial Sequence
  Synthetic
VFTLEDFVGDWEQTAAYNLDQVLEQGGVSSLFQNLAVSVTPIQRIVLSGENALKIDIHVIIPYEGLSADQMAQIEKIFKVVYPVDDHHFKVILHYGTLVIDGVTPNMINYFGRPYEGIAVFDGKKITVTGTLWNGNKIIDERLITPDGSMLFRVTINT

SEQ ID NO: 2059 - DNA, 474 bp, Artificial Sequence
  Synthetic
gtcttcacactcgaagatttcgttggggactgggaacagacagccgcctacaacctggaccaagtccttgaacagggaggtgtgtccagtttgtttcagaatctcgccgtgtccgtaactccgatccaaaggattgtcctgagcggtgaaaatgccctgaagatcgacatccatgtcatcatcccgtatgaaggtctgagcgccgaccaaatggcccagatcgaaaaaatttttaaggtggtgtaccctgtggatgatcatcactttaaggtgatcctgcactatggcacactggtaatcgacggggttacgccgaacatgatcaactatttcggacggccgtatgaaggcatcgccgtgttcgacggcaaaaagatcactgtaacagggaccctgtggaacggcaacaaaattatcgacgagcgcctgatcacccccgacggctccatgctgttccgagtaaccatcaacgtg

SEQ ID NO: 2060 - protein, 158 aa, Artificial Sequence
  Synthetic
VFTLEDFVGDWEQTAAYNLDQVLEQGGVSSLFQNLAVSVTPIQRIVLSGENALKIDIHVIIPYEGLSADQMAQIEKIFKVVYPVDDHHFKVILHYGTLVIDGVTPNMINYFGRPYEGIAVFDGKKITVTGTLWNGNKIIDERLITPDGSMLFRVTINV

SEQ ID NO: 2061 - DNA, 474 bp, Artificial Sequence
  Synthetic
gtcttcacactcgaagatttcgttggggactgggaacagacagccgcctacaacctggaccaagtccttgaacagggaggtgtgtccagtttgtttcagaatctcgccgtgtccgtaactccgatccaaaggattgtcctgagcggtgaaaatgccctgaagatcgacatccatgtcatcatcccgtatgaaggtctgagcgccgaccaaatggcccagatcgaaaaaatttttaaggtggtgtaccctgtggatgatcatcactttaaggtgatcctgcactatggcacactggtaatcgacggggttacgccgaacatgatcaactatttcggacggccgtatgaaggcatcgccgtgttcgacggcaaaaagatcactgtaacagggaccctgtggaacggcaacaaaattatcgacgagcgcctgatcacccccgacggctccatgctgttccgagtaaccatcaactgg

SEQ ID NO: 2062 - protein, 158 aa, Artificial Sequence
  Synthetic
VFTLEDFVGDWEQTAAYNLDQVLEQGGVSSLFQNLAVSVTPIQRIVLSGENALKIDIHVIIPYEGLSADQMAQIEKIFKVVYPVDDHHFKVILHYGTLVIDGVTPNMINYFGRPYEGIAVFDGKKITVTGTLWNGNKIIDERLITPDGSMLFRVTINW

SEQ ID NO: 2063 - DNA, 474 bp, Artificial Sequence
  Synthetic
gtcttcacactcgaagatttcgttggggactgggaacagacagccgcctacaacctggaccaagtccttgaacagggaggtgtgtccagtttgtttcagaatctcgccgtgtccgtaactccgatccaaaggattgtcctgagcggtgaaaatgccctgaagatcgacatccatgtcatcatcccgtatgaaggtctgagcgccgaccaaatggcccagatcgaaaaaatttttaaggtggtgtaccctgtggatgatcatcactttaaggtgatcctgcactatggcacactggtaatcgacggggttacgccgaacatgatcaactatttcggacggccgtatgaaggcatcgccgtgttcgacggcaaaaagatcactgtaacagggaccctgtggaacggcaacaaaattatcgacgagcgcctgatcacccccgacggctccatgctgttccgagtaaccatcaactac

SEQ ID NO: 2064 - protein, 158 aa, Artificial Sequence
  Synthetic
VFTLEDFVGDWEQTAAYNLDQVLEQGGVSSLFQNLAVSVTPIQRIVLSGENALKIDIHVIIPYEGLSADQMAQIEKIFKVVYPVDDHHFKVILHYGTLVIDGVTPNMINYFGRPYEGIAVFDGKKITVTGTLWNGNKIIDERLITPDGSMLFRVTINY

SEQ ID NO: 2065 - DNA, 474 bp, Artificial Sequence
  Synthetic
gtcttcacactcgaagatttcgttggggactgggaacagacagccgcctacaacctggaccaagtccttgaacagggaggtgtgtccagtttgtttcagaatctcgccgtgtccgtaactccgatccaaaggattgtcctgagcggtgaaaatgccctgaagatcgacatccatgtcatcatcccgtatgaaggtctgagcgccgaccaaatggcccagatcgaaaaaatttttaaggtggtgtaccctgtggatgatcatcactttaaggtgatcctgcactatggcacactggtaatcgacggggttacgccgaacatgctgaactatttcggacggccgtatgaaggcatcgccgtgttcgacggcaaaaagatcactgtaacagggaccctgtggaacggcaacaaaattatcgacgagcgcctgatcacccccgacggctccatgctgttccgagtaaccatcaacccc

SEQ ID NO: 2066 - protein, 158 aa, Artificial Sequence
  Synthetic
VFTLEDFVGDWEQTAAYNLDQVLEQGGVSSLFQNLAVSVTPIQRIVLSGENALKIDIHVIIPYEGLSADQMAQIEKIFKVVYPVDDHHFKVILHYGTLVIDGVTPNMLNYFGRPYEGIAVFDGKKITVTGTLWNGNKIIDERLITPDGSMLFRVTINP

SEQ ID NO: 2067 - DNA, 474 bp, Artificial Sequence
  Synthetic
gtcttcacactcgaagatttcgttggggactgggaacagacagccgcctacaacctggaccaagtccttgaacagggaggtgtgtccagtttgtttcagaatctcgccgtgtccgtaactccgatccaaaggattgtcctgagcggtgaaaatgccctgaagatcgacatccatgtcatcatcccgtatgaaggtctgagcgccgaccaaatggcccagatcgaagagatttttaaggtggtgtaccctgtggatgatcatcactttaaggtgatcctgcactatggcacactggtaatcgacggggttacgccgaacatgatcaactatttcggacggccgtatgaaggcatcgccgtgttcgacggcaaaaagatcactgtaacagggaccctgtggaacggcaacaaaattatcgacgagcgcctgatcacccccgacggctccatgctgttccgagtaaccatcaacccc

SEQ ID NO: 2068 - protein, 158 aa, Artificial Sequence
  Synthetic
VFTLEDFVGDWEQTAAYNLDQVLEQGGVSSLFQNLAVSVTPIQRIVLSGENALKIDIHVIIPYEGLSADQMAQIEEIFKVVYPVDDHHFKVILHYGTLVIDGVTPNMINYFGRPYEGIAVFDGKKITVTGTLWNGNKIIDERLITPDGSMLFRVTINP

SEQ ID NO: 2069 - DNA, 474 bp, Artificial Sequence
  Synthetic
gtcttcacactcgaagatttcgttggggactgggaacagacagccgcctacaacctggaccaagtccttgaacagggaggtgtgtccagtttgtttcagaatctcgccgtgtccgtaactccgatccaaaggattgtcctgagcggtgaaaatgccctgaagatcgacatccatgtcatcatcccgtatgaaggtctgagcgccgaccaaatggcccagatcgaaaaaatttttaaggtggtgtaccctgtggatgatcatcactttaaggtgatcctgcactatggcacactggtaatcgacggggttacgccgaacatgatcaactatttcggacggccgtatgaaggcatcgccgtgttcgacggcgagaagatcactgtaacagggaccctgtggaacggcaacaaaattatcgacgagcgcctgatcacccccgacggctccatgctgttccgagtaaccatcgacccc

SEQ ID NO: 2070 - protein, 158 aa, Artificial Sequence
  Synthetic
VFTLEDFVGDWEQTAAYNLDQVLEQGGVSSLFQNLAVSVTPIQRIVLSGENALKIDIHVIIPYEGLSADQMAQIEKIFKVVYPVDDHHFKVILHYGTLVIDGVTPNMINYFGRPYEGIAVFDGEKITVTGTLWNGNKIIDERLITPDGSMLFRVTIDP

SEQ ID NO: 2071 - DNA, 474 bp, Artificial Sequence
  Synthetic
gtcttcacactcgaagatttcgttggggactgggaacagacagccgcctacaacctggaccaagtccttgaacagggaggtgtgtccagtttgtttcagaatctcgccgtgtccgtaactccgatccaaaggattgtcctgagcggtgaaaatgccctgaagatcgacatccatgtcatcatcccgtatgaaggtctgagcgccgaccaaatggcccagatcgaaaaagtgtttaaggtggtgtaccctgtggatgatcatcactttaaggtgatcctgcactatggcacactggtaatcgacggggttacgccgaacatgatcaactatttcggacggccgtatgaaggcatcgccgtgttcgacggcaaaaagatcactgtaacagggaccctgtggaacggcaacaaaattatcgacgagcgcctgatcacccccgacggctccatgctgttccgagtaaccatcaacccc

SEQ ID NO: 2072 - protein, 158 aa, Artificial Sequence
  Synthetic
VFTLEDFVGDWEQTAAYNLDQVLEQGGVSSLFQNLAVSVTPIQRIVLSGENALKIDIHVIIPYEGLSADQMAQIEKVFKVVYPVDDHHFKVILHYGTLVIDGVTPNMINYFGRPYEGIAVFDGKKITVTGTLWNGNKIIDERLITPDGSMLFRVTINP

SEQ ID NO: 2073 - DNA, 474 bp, Artificial Sequence
  Synthetic
gtcttcacactcgaagatttcgttggggactgggaacagacagccgcctacaacctggaccaagtccttgaacagggaggtgtgtccagtttgtttcagaatctcgccgtgtccgtaactccgatccaaaggattgtcctgagcgacgaaaatgccctgaagatcgacatccgggtcatcatcccgtatgaaggtctgagcgccgaccaaatggcccagatcgaaaaaatttttaaggtggtgtaccctgtggatgatcatcactttaaggtgatcatgcactatggcacactggtagtggacggggttacgccgaacatgatcaactatttcggacggccgtatgaaggcatcgccgtgttcgacggcaaaaagatcactgtaacagggaccctgtggaacggcaacaaaattatcgacgagcgcctgatcacccccgacggctccatgctgttccgagtaaccatcaacccc

SEQ ID NO: 2074 - protein, 158 aa, Artificial Sequence
  Synthetic
VFTLEDFVGDWEQTAAYNLDQVLEQGGVSSLFQNLAVSVTPIQRIVLSDENALKIDIRVIIPYEGLSADQMAQIEKIFKVVYPVDDHHFKVIMHYGTLVVDGVTPNMINYFGRPYEGIAVFDGKKITVTGTLWNGNKIIDERLITPDGSMLFRVTINP

SEQ ID NO: 2075 - DNA, 474 bp, Artificial Sequence
  Synthetic
gtcttcacactcgaagatttcgttggggactgggaacagacagccgcctacaacctggaccaagtccttgaacagggaggtgtgtccagtttgctgcagaatctcgccgcctccgtaactccgatccaaaggattgtcctgagcggtgaaaatgccctgaagatcgacatccatgtcatcatcccgtatgaaggtctgagcgccgaccaaatggcccagatcgaaaaaatttttaaggtggtgtaccctgtggatgatcatcactttaaggtgatcctgcactatggcacactggtagtggacggggttacgccgaacatgatcaactatttcggacggccgtatgaaggcatcgccgtgttcgacggcaaaaagatcactgtaacagggaccctgtggaacggcaacaaaattatcgacgagcgcctgatcacccccgacggctccatgctgttccgagtaaccatcaacccc

SEQ ID NO: 2076 - protein, 158 aa, Artificial Sequence
  Synthetic
VFTLEDFVGDWEQTAAYNLDQVLEQGGVSSLLQNLAASVTPIQRIVLSGENALKIDIHVIIPYEGLSADQMAQIEKIFKVVYPVDDHHFKVILHYGTLVVDGVTPNMINYFGRPYEGIAVFDGKKITVTGTLWNGNKIIDERLITPDGSMLFRVTINP

SEQ ID NO: 2077 - DNA, 474 bp, Artificial Sequence
  Synthetic
gtcttcacactcgaagatttcgttggggactgggaacagacagccgcctacaacctggaccaagtccttgaacagggaggtgtgtccagtttgctgcagaatctcgccgtgtccgtaactccgatccaaaggattgtcctgagcggtgaaaatgccctgaagatcgacatccatgtcatcatcccgtatgaaggtctgagcgccgaccaaatggcccagatcgaaaaaatttttaaggtggtgtaccctgtggatgatcatcactttaaggtgatcctgccctatggcacactggtaatcgacggggttacgccgaacatgatcaactatttcggacggccgtatgaaggcatcgccgtgttcgacggcaaaaagatcactgtaacagggaccctgtggaacggcaacaaaattatcgacgagcgcctgatcacccccgacggctccatgctgttccgagtaaccatcaacccc

SEQ ID NO: 2078 - protein, 158 aa, Artificial Sequence
  Synthetic
VFTLEDFVGDWEQTAAYNLDQVLEQGGVSSLLQNLAVSVTPIQRIVLSGENALKIDIHVIIPYEGLSADQMAQIEKIFKVVYPVDDHHFKVILPYGTLVIDGVTPNMINYFGRPYEGIAVFDGKKITVTGTLWNGNKIIDERLITPDGSMLFRVTINP

SEQ ID NO: 2079 - DNA, 474 bp, Artificial Sequence
  Synthetic
gtcttcacactcgaagatttcgttggggactgggaacagacagccgcctacaacctggaccaagtccttgaacagggaggtgtgtccagtttgtttcagaatctcgccgtgtccgtaactccgatccaaaggattgtcctgagcggtgaaaatgccctgaagatcgacatccatgtcatcatcccgtatgaaggtctgagcgccgaccaaatggcccagatcgaaaaaatttttaaggtggtgtaccctgtggatgatcatcactttaaggccatcctgcactatggcacactggtaatcgacggggttacgccgaacatgatcaactatttcggacggccgtatgaaggcatcgccgtgttcgacggcaaaaagatcactgtaacagggaccctgtggaacggcaacaaaattatcgacgagcgcctgatcacccccgacggctccatgctgttccgagtaaccatcaacccc

SEQ ID NO: 2080 - protein, 158 aa, Artificial Sequence
  Synthetic
VFTLEDFVGDWEQTAAYNLDQVLEQGGVSSLFQNLAVSVTPIQRIVLSGENALKIDIHVIIPYEGLSADQMAQIEKIFKVVYPVDDHHFKAILHYGTLVIDGVTPNMINYFGRPYEGIAVFDGKKITVTGTLWNGNKIIDERLITPDGSMLFRVTINP

SEQ ID NO: 2081 - DNA, 474 bp, Artificial Sequence
  Synthetic
gtcttcacactcgaagatttcgttggggactgggaacagacagccgcctacaacctggaccaagtccttgaacagggaggtgtgtccagtttgtttcagaatctcgccgtgtccgtaactccgatccaaagggtggtcctgagcggtgaaaatgccctgaagatcgacatccatgtcatcatcccgtatgaaggtctgagcgccgaccaaatggcccagatcgaaaaaatttttaaggtggtgtaccctgtggatgatcatcactttaaggtgatcctgcactatggcacactggtaatcgacggggttacgccgaacatgatcaactatttcggacggccgtatgaaggcatcgccgtgttcgacggcaaaaagatcactgtaacagggaccctgtggaacggcaacaaaattatcgacgagcgcctgatcacccccgacggctccatgctgttccgagtaaccatcaacccc

SEQ ID NO: 2082 - protein, 158 aa, Artificial Sequence
  Synthetic
VFTLEDFVGDWEQTAAYNLDQVLEQGGVSSLFQNLAVSVTPIQRVVLSGENALKIDIHVIIPYEGLSADQMAQIEKIFKVVYPVDDHHFKVILHYGTLVIDGVTPNMINYFGRPYEGIAVFDGKKITVTGTLWNGNKIIDERLITPDGSMLFRVTINP

SEQ ID NO: 2083 - DNA, 474 bp, Artificial Sequence
  Synthetic
gtcttcacactcgaagatttcgttggggactgggaacagacagccgcctacaacctggaccaagtccttgaacagggaggtgtgtccagtttgtttcagaatctcgccgtgtccgtaactccgatccaaaggattgtccggagcggtgaaaatgccctgaagatcgacatccatgtcatcatcccgtatgaaggtctgagcgccgaccaaatggcccagatcgaaaaaatttttaaggtggtgtaccctgtggatgatcagcactttaaggtgatcctgcactatggcacactggtaatcgacggggttacgccgaacgtgatcaactatttcggacggccgtatgaaggcatcgccgtgttcgacggcaaaaagatcactgtaacagggaccctgtggaacggcaacaaaattatcgacgagcgcctgatcacccccgacggctccatgctgttccgagtaaccatcaacccc

SEQ ID NO: 2084 - protein, 158 aa, Artificial Sequence
  Synthetic
VFTLEDFVGDWEQTAAYNLDQVLEQGGVSSLFQNLAVSVTPIQRIVRSGENALKIDIHVIIPYEGLSADQMAQIEKIFKVVYPVDDQHFKVILHYGTLVIDGVTPNVINYFGRPYEGIAVFDGKKITVTGTLWNGNKIIDERLITPDGSMLFRVTINP

SEQ ID NO: 2085 - DNA, 474 bp, Artificial Sequence
  Synthetic
gtcttcacactcgaagatttcgttggggactgggaacagacagccgcctacaacctggaccaagtccttgaacagggaggtgtgtccagtttgtttcagaatctcgccgtgtccgtaactccgatccaaaggattgtcctgagcggtgaaaatgccctgaagatcgacatccatgtcatcatcccgtatgaaggtctgagcgccgaccaaatggcccagatcgaaaaaatttttaaggtggtgtaccctgtggatgatcatcactttaaggtgatcctgcactatggcacactggtaatcgacggggttacgccgaacatgatcaactatttcggacggccgtatgaaggcatcgccgtgttcgacggcaaaaagatcactgtaacagggaccctgtggaacggcaacaaaattatcgacgagcacctgatcacccccgacggctccatgctgttccgagtaaccatcaacccc

SEQ ID NO: 2086 - protein, 158 aa, Artificial Sequence
  Synthetic
VFTLEDFVGDWEQTAAYNLDQVLEQGGVSSLFQNLAVSVTPIQRIVLSGENALKIDIHVIIPYEGLSADQMAQIEKIFKVVYPVDDHHFKVILHYGTLVIDGVTPNMINYFGRPYEGIAVFDGKKITVTGTLWNGNKIIDEHLITPDGSMLFRVTINP

SEQ ID NO: 2087 - DNA, 474 bp, Artificial Sequence
  Synthetic
gtcttcacactcgaagatttcgttggggactgggaacagacagccgcctacaacctggaccaagtccttgaacagggaggtgtgtccagtttgtttcaggacctcgccgtgtccgtaactccgatccaaaggattgtcctgagcggtgaaaatgccctgaagatcgacatccatgccatcatcccgtatgaaggtctgagcgccgaccaaatggcccagatcgaaaaaatttttaaggtggtgtaccctgtggatgatcatcactttaaggtgatcctgcactatggcacactggtaatcgacggggttacgccgaacatgatcaactatttcggacggccgtatgaaggcatcgccgtgttcgacggcaaaaagatcactgtaacagggaccctgtggaacggcaacaaaattatcgacgagcgcctgatcacccccgacggctccatgctgttccgagtaaccatcaacccc

SEQ ID NO: 2088 - protein, 158 aa, Artificial Sequence
  Synthetic
VFTLEDFVGDWEQTAAYNLDQVLEQGGVSSLFQDLAVSVTPIQRIVLSGENALKIDIHAIIPYEGLSADQMAQIEKIFKVVYPVDDHHFKVILHYGTLVIDGVTPNMINYFGRPYEGIAVFDGKKITVTGTLWNGNKIIDERLITPDGSMLFRVTINP

SEQ ID NO: 2089 - DNA, 474 bp, Artificial Sequence
  Synthetic
gtcttcacactcgaagatttcgttggggactgggaacagacagccgcctacaacctggaccaagtccttgaacagggaggtgtgtccagtttgtttcagaatctcgccgtgtccgtaactccgatccaaaggattgtcctgagcggtgaaaatgccctgaagatcgacaaccatgtcatcatcccgtatgaaggtctgagcgccgaccaaatggcccagatcgaaaaaatttttaaggtggtgtaccctgtggatgatcatcactttaaggtgatcctgcactatggcacactggtaatcgacggggttacgccgaacatgatcaactatttcggacggccgtatgaaggcatcgccgtgttcgacggcaaaaagatcactgtaacagggaccctgtggaacggccacaaaattatcgacgagcgcctgatcacccccgacggctccatgctgttccgagtaaccatcaacccc

SEQ ID NO: 2090 - protein, 158 aa, Artificial Sequence
  Synthetic
VFTLEDFVGDWEQTAAYNLDQVLEQGGVSSLFQNLAVSVTPIQRIVLSGENALKIDNHVIIPYEGLSADQMAQIEKIFKVVYPVDDHHFKVILHYGTLVIDGVTPNMINYFGRPYEGIAVFDGKKITVTGTLWNGHKIIDERLITPDGSMLFRVTINP

SEQ ID NO: 2091 - DNA, 474 bp, Artificial Sequence
  Synthetic
gtcttcacactcgaagatttcgttggggactgggaacagacagccgcctacaacctggaccaagtccttgaacagggaggtgtgtccagtttgtttcagaatctcgccgtgtccgtaactccgatccaaaggattgtccagagcggtgaaaatgccctgaagatcgacatccatgtcatcatcccgtatgaaggtctgagcgccgaccaaatggcccagatcgaaaaaatttttaaggtggtgtaccctgtggatgatcatcactttaaggtgatcctgcactatggcacactggtaatcgacggggttacgccgaacatgatcaactatttcggacggccgtatgaaggcatcgccgtgttcgacggcaaaaagatcactgtaacagggaccctgtggaacggcaacaaaattatcgacgagcgcctgatcacccccgacggctccatgctgttccgagtaaccatcaaccac

SEQ ID NO: 2092 - protein, 158 aa, Artificial Sequence
  Synthetic
VFTLEDFVGDWEQTAAYNLDQVLEQGGVSSLFQNLAVSVTPIQRIVQSGENALKIDIHVIIPYEGLSADQMAQIEKIFKVVYPVDDHHFKVILHYGTLVIDGVTPNMINYFGRPYEGIAVFDGKKITVTGTLWNGNKIIDERLITPDGSMLFRVTINH

SEQ ID NO: 2093 - DNA, 474 bp, Artificial Sequence
  Synthetic
gtcttcacactcgaagatttcgttggggactgggaacagacagccgcctacaacctggaccaagtccttgaacagggaggtgtgtccagtttgtttcagaatctcgccgtgtccgtaactccgatccaaaggattgtcctgagcggtgaaaatgccctgaagatcgacatccatgtcatcgtgccgtatgaaggtctgagcgccgaccaaatggcccagatcgaaaaaatttttaaggtggtgtaccctgtggatgatcatcactttaaggtgatcctgcactatggcacactggtaatcgacggggttacgccgaacatgatcaactatttcggacggccgtatgaaggcatcgccgtgttcgacggcaaaaagatcactgtaacagggaccctgtggaacggcaacaaaattatcgacgagcgcctgatcacccccgacggctccatgctgttccgagtaaccatcaacccc

SEQ ID NO: 2094 - protein, 158 aa, Artificial Sequence
  Synthetic
VFTLEDFVGDWEQTAAYNLDQVLEQGGVSSLFQNLAVSVTPIQRIVLSGENALKIDIHVIVPYEGLSADQMAQIEKIFKVVYPVDDHHFKVILHYGTLVIDGVTPNMINYFGRPYEGIAVFDGKKITVTGTLWNGNKIIDERLITPDGSMLFRVTINP

SEQ ID NO: 2095 - DNA, 474 bp, Artificial Sequence
  Synthetic
gtcttcacactcgaagatttcgttggggactgggaacagacagccgcctacaacctggaccaagtccttgaacagggaggtgtgtccagtttgtttcagaatctcgccgtgtccgtaactccgatccaaaggattgtcctgagcggtgaaaataccctgaagatcgacatccatgtcatcatcccgtatgaaggtctgagcgccgaccaaatggcccagatcaaaaaaatttttaaggtggtgtaccctgtggatgatcatcactttaaggtgatcctgcactatggcacactggtaatcgacggggttacgccgaacatgatcaactatttcggacggctgtatgaaggcatcgccgtgttcgacggcaaaaagatcactgtaacagggaccctgtggaacggcaacaaaattatcgacgagcgcctgatcacccccgacggctccatgctgttccgagtaaccatcaacccc

SEQ ID NO: 2096 - protein, 158 aa, Artificial Sequence
  Synthetic
VFTLEDFVGDWEQTAAYNLDQVLEQGGVSSLFQNLAVSVTPIQRIVLSGENTLKIDIHVIIPYEGLSADQMAQIKKIFKVVYPVDDHHFKVILHYGTLVIDGVTPNMINYFGRLYEGIAVFDGKKITVTGTLWNGNKIIDERLITPDGSMLFRVTINP

SEQ ID NO: 2097 - DNA, 474 bp, Artificial Sequence
  Synthetic
gtcttcacactcgaagatttcgttggggactgggaacagacagccgcctacaacctggaccaagtccttgaacagggaggtgtgtccagtttgtttcagaatctcgccgcctccgtaactccgatccaaaggattgtcctgagcggtgaaaatgccctgaagatcgacatccatgtcatcatcccgtatgaaggtctgagcgccgaccaaatggcccagatcgaaaaaatttttaaggtggtgtaccctgtggatgatcatcactttaaggtgatcctgcactatggcacactggtaatcgacggggttacgccgaacatgatcaactatttcggacggccgtatgaaggcatcgccgtgttcgacggcaaaaagatcactgtaacagggaccctgtggaacggcaacaaaattatcgacgagcgcctgatcacccccgacggctccatgctgttccgagtaaccatcaacccc

SEQ ID NO: 2098 - protein, 158 aa, Artificial Sequence
  Synthetic
VFTLEDFVGDWEQTAAYNLDQVLEQGGVSSLFQNLAASVTPIQRIVLSGENALKIDIHVIIPYEGLSADQMAQIEKIFKVVYPVDDHHFKVILHYGTLVIDGVTPNMINYFGRPYEGIAVFDGKKITVTGTLWNGNKIIDERLITPDGSMLFRVTINP

SEQ ID NO: 2099 - DNA, 474 bp, Artificial Sequence
  Synthetic
gtcttcacactcgaagatttcgttggggactgggaacagacagccgcctacaacctggaccaagtccttgaacagggaggtgtgtccagtttgtttcagaatctcgccgtgtccgtaactccgatccaaaggattgtcctgagcggtgaaaataccctgaagatcgacatccatgtcatcatcccgtatgaaggtctgagcgccgaccaaatggcccagatcgaaaaaatttttaaggtggtgtaccctgtggatgatcatcactttaaggtgatcctgcactatggcacactggtaatcgacggggttacgccgaacatgatcaactatttcggacggccgtatgaaggcatcgccgtgttcgacggcaaaaagatcactgtaacagggaccctgtggaacggcaacaaaattatcgacgagcgcctgatcacccccgacggctccatgctgttccgagtaaccatcaacccc

SEQ ID NO: 2100 - protein, 158 aa, Artificial Sequence
  Synthetic
VFTLEDFVGDWEQTAAYNLDQVLEQGGVSSLFQNLAVSVTPIQRIVLSGENTLKIDIHVIIPYEGLSADQMAQIEKIFKVVYPVDDHHFKVILHYGTLVIDGVTPNMINYFGRPYEGIAVFDGKKITVTGTLWNGNKIIDERLITPDGSMLFRVTINP

SEQ ID NO: 2101 - DNA, 474 bp, Artificial Sequence
  Synthetic
gtcttcacactcgaagatttcgttggggactgggaacagacagccgcctacaacctggaccaagtccttgaacagggaggtgtgtccagtttgtttcagaatctcgccgtgtccgtaactccgatccaaaggattgtcctgagcggtgaaaatgccctgaagatcgacatccgggtcatcatcccgtatgaaggtctgagcgccgaccaaatggcccagatcgaaaaaatttttaaggtggtgtaccctgtggatgatcatcactttaaggtgatcctgcactatggcacactggtaatcgacggggttacgccgaacatgatcaactatttcggacggccgtatgaaggcatcgccgtgttcgacggcaaaaagatcactgtaacagggaccctgtggaacggcaacaaaattatcgacgagcgcctgatcacccccgacggctccatgctgttccgagtaaccatcaacccc

SEQ ID NO: 2102 - protein, 158 aa, Artificial Sequence
  Synthetic
VFTLEDFVGDWEQTAAYNLDQVLEQGGVSSLFQNLAVSVTPIQRIVLSGENALKIDIRVIIPYEGLSADQMAQIEKIFKVVYPVDDHHFKVILHYGTLVIDGVTPNMINYFGRPYEGIAVFDGKKITVTGTLWNGNKIIDERLITPDGSMLFRVTINP

SEQ ID NO: 2103 - DNA, 474 bp, Artificial Sequence
  Synthetic
gtcttcacactcgaagatttcgttggggactgggaacagacagccgcctacaacctggaccaagtccttgaacagggaggtgtgtccagtttgtttcagaatctcgccgtgtccgtaactccgatccaaaggattgtcctgagcggtgaaaatgccctgaagatcgacatccatgccatcatcccgtatgaaggtctgagcgccgaccaaatggcccagatcgaaaaaatttttaaggtggtgtaccctgtggatgatcatcactttaaggtgatcctgcactatggcacactggtaatcgacggggttacgccgaacatgatcaactatttcggacggccgtatgaaggcatcgccgtgttcgacggcaaaaagatcactgtaacagggaccctgtggaacggcaacaaaattatcgacgagcgcctgatcacccccgacggctccatgctgttccgagtaaccatcaacccc

SEQ ID NO: 2104 - protein, 158 aa, Artificial Sequence
  Synthetic
VFTLEDFVGDWEQTAAYNLDQVLEQGGVSSLFQNLAVSVTPIQRIVLSGENALKIDIHAIIPYEGLSADQMAQIEKIFKVVYPVDDHHFKVILHYGTLVIDGVTPNMINYFGRPYEGIAVFDGKKITVTGTLWNGNKIIDERLITPDGSMLFRVTINP

SEQ ID NO: 2105 - DNA, 474 bp, Artificial Sequence
  Synthetic
gtcttcacactcgaagatttcgttggggactgggaacagacagccgcctacaacctggaccaagtccttgaacagggaggtgtgtccagtttgtttcagaatctcgccgtgtccgtaactccgatccaaaggattgtcctgagcggtgaaaatgccctgaagatcgacatccatgtcatcatcccgtatgaaggtctgagcgccgaccaaatggcccagatcaagaaaatttttaaggtggtgtaccctgtggatgatcatcactttaaggtgatcctgcactatggcacactggtaatcgacggggttacgccgaacatgatcaactatttcggacggccgtatgaaggcatcgccgtgttcgacggcaaaaagatcactgtaacagggaccctgtggaacggcaacaaaattatcgacgagcgcctgatcacccccgacggctccatgctgttccgagtaaccatcaacccc

SEQ ID NO: 2106 - protein, 158 aa, Artificial Sequence
  Synthetic
VFTLEDFVGDWEQTAAYNLDQVLEQGGVSSLFQNLAVSVTPIQRIVLSGENALKIDIHVIIPYEGLSADQMAQIKKIFKVVYPVDDHHFKVILHYGTLVIDGVTPNMINYFGRPYEGIAVFDGKKITVTGTLWNGNKIIDERLITPDGSMLFRVTINP

SEQ ID NO: 2107 - DNA, 474 bp, Artificial Sequence
  Synthetic
gtcttcacactcgaagatttcgttggggactgggaacagacagccgcctacaacctggaccaagtccttgaacagggaggtgtgtccagtttgtttcagaatctcgccgtgtccgtaactccgatccaaaggattgtcctgagcggtgaaaatgccctgaagatcgacatccatgtcatcatcccgtatgaaggtctgagcgccgaccaaatggcccagatcgaaaaaatttttaaggtggtgtaccctgtggatgatcagcactttaaggtgatcctgcactatggcacactggtaatcgacggggttacgccgaacatgatcaactatttcggacggccgtatgaaggcatcgccgtgttcgacggcaaaaagatcactgtaacagggaccctgtggaacggcaacaaaattatcgacgagcgcctgatcacccccgacggctccatgctgttccgagtaaccatcaacccc

SEQ ID NO: 2108 - protein, 158 aa, Artificial Sequence
  Synthetic
VFTLEDFVGDWEQTAAYNLDQVLEQGGVSSLFQNLAVSVTPIQRIVLSGENALKIDIHVIIPYEGLSADQMAQIEKIFKVVYPVDDQHFKVILHYGTLVIDGVTPNMINYFGRPYEGIAVFDGKKITVTGTLWNGNKIIDERLITPDGSMLFRVTINP

SEQ ID NO: 2109 - DNA, 474 bp, Artificial Sequence
  Synthetic
gtcttcacactcgaagatttcgttggggactgggaacagacagccgcctacaacctggaccaagtccttgaacagggaggtgtgtccagtttgtttcagaatctcgccgtgtccgtaactccgatccaaaggattgtcctgagcggtgaaaatgccctgaagatcgacatccatgtcatcatcccgtatgaaggtctgagcgccgaccaaatggcccagatcgaaaaaatttttaaggtggtgtaccctgtggatgatcatcactttaaggtgatcctgccctatggcacactggtaatcgacggggttacgccgaacatgatcaactatttcggacggccgtatgaaggcatcgccgtgttcgacggcaaaaagatcactgtaacagggaccctgtggaacggcaacaaaattatcgacgagcgcctgatcacccccgacggctccatgctgttccgagtaaccatcaacccc

SEQ ID NO: 2110 - protein, 158 aa, Artificial Sequence
  Synthetic
VFTLEDFVGDWEQTAAYNLDQVLEQGGVSSLFQNLAVSVTPIQRIVLSGENALKIDIHVIIPYEGLSADQMAQIEKIFKVVYPVDDHHFKVILPYGTLVIDGVTPNMINYFGRPYEGIAVFDGKKITVTGTLWNGNKIIDERLITPDGSMLFRVTINP

SEQ ID NO: 2111 - DNA, 474 bp, Artificial Sequence
  Synthetic
gtcttcacactcgaagatttcgttggggactgggaacagacagccgcctacaacctggaccaagtccttgaacagggaggtgtgtccagtttgtttcagaatctcgccgtgtccgtaactccgatccaaaggattgtcctgagcggtgaaaatgccctgaagatcgacatccatgtcatcatcccgtatgaaggtctgagcgccgaccaaatggcccagatcgaaaaaatttttaaggtggtgtaccctgtggatgatcatcactttaaggtgatcctgcactatggcacactggtaatcgacggggttacgccgaacatgatcaactatttcggacggccgtatgaaggcatcgccgtgttcgacggcgagaagatcactgtaacagggaccctgtggaacggcaacaaaattatcgacgagcgcctgatcacccccgacggctccatgctgttccgagtaaccatcaacccc

SEQ ID NO: 2112 - protein, 158 aa, Artificial Sequence
  Synthetic
VFTLEDFVGDWEQTAAYNLDQVLEQGGVSSLFQNLAVSVTPIQRIVLSGENALKIDIHVIIPYEGLSADQMAQIEKIFKVVYPVDDHHFKVILHYGTLVIDGVTPNMINYFGRPYEGIAVFDGEKITVTGTLWNGNKIIDERLITPDGSMLFRVTINP

SEQ ID NO: 2113 - DNA, 474 bp, Artificial Sequence
  Synthetic
gtcttcacactcgaagatttcgttggggactgggaacagacagccgcctacaacctggaccaagtccttgaacagggaggtgtgtccagtttgtttcagaatctcgccgtgtccgtaactccgatccaaaggattgtcctgagcggtgaaaatgccctgaagatcgacatccatgtcatcatcccgtatgaaggtctgagcgccgaccaaatggcccagatcgaaaaaatttttaaggtggtgtaccctgtggatgatcatcactttaaggtgatcctgcactatggcacactggtaatcgacggggttacgccgaacatgatcaactatttcggacggccgtatgaaggcatcgccgtgttcgacggcaaaaagatcactgtaagcgggaccctgtggaacggcaacaaaattatcgacgagcgcctgatcacccccgacggctccatgctgttccgagtaaccatcaacccc

SEQ ID NO: 2114 - protein, 158 aa, Artificial Sequence
  Synthetic
VFTLEDFVGDWEQTAAYNLDQVLEQGGVSSLFQNLAVSVTPIQRIVLSGENALKIDIHVIIPYEGLSADQMAQIEKIFKVVYPVDDHHFKVILHYGTLVIDGVTPNMINYFGRPYEGIAVFDGKKITVSGTLWNGNKIIDERLITPDGSMLFRVTINP

SEQ ID NO: 2115 - DNA, 474 bp, Artificial Sequence
  Synthetic
gtcttcacactcgaagatttcgttggggactgggaacagacagccgcctacaacctggaccaagtccttgaacagggaggtgtgtccagtttgtttcagaatctcgccgtgtccgtaactccgatccaaaggattgtcctgagcggtgaaaatgccctgaagatcgacatccatgtcatcatcccgtatgaaggtctgagcgccgaccaaatggcccagatcgaaaaaatttttaaggtggtgtaccctgtggatgatcatcactttaaggtgatcctgcactatggcacactggtaatcgacggggttacgccgaacatgatcaactatttcggacggccgtatgaaggcatcgccgtgttcgacggcaaaaagatcactgtaacagggaccctgtggaacggcaacaaaattatcgacgagcgccagatcacccccgacggctccatgctgttccgagtaaacatcaacccc

SEQ ID NO: 2116 - protein, 158 aa, Artificial Sequence
  Synthetic
VFTLEDFVGDWEQTAAYNLDQVLEQGGVSSLFQNLAVSVTPIQRIVLSGENALKIDIHVIIPYEGLSADQMAQIEKIFKVVYPVDDHHFKVILHYGTLVIDGVTPNMINYFGRPYEGIAVFDGKKITVTGTLWNGNKIIDERQITPDGSMLFRVNINP

SEQ ID NO: 2117 - DNA, 474 bp, Artificial Sequence
  Synthetic
gtcttcacactcgaagatttcgttggggactgggaacagacagccgcctacaacctggaccaagtccttgaacagggaggtgtgtccagtttgtttcagaatctcgccgtgtccgtaactccgatccaaaggattgtcctgagcggtgaaaatgccctgaagatcgacatccatgtcatcatcccgtatgaaggtctgagcgccgaccaaatggcccagatcgaaaaaatttttaaggtggtgtaccctgtggatgatcatcactttaaggtgatcctgcactatggcacactggtaatcgacggggttacgccgaacatgatcaactatttcggacggccgtatgaaggcatcgccgtgttcgacggcaaaaagatcactgtaacagggaccctgtggaacggcaacaaaattatcgacgagcgcctgatcacccccgacggctccatgctgttccgagtaaccatcgacccc

SEQ ID NO: 2118 - protein, 158 aa, Artificial Sequence
  Synthetic
VFTLEDFVGDWEQTAAYNLDQVLEQGGVSSLFQNLAVSVTPIQRIVLSGENALKIDIHVIIPYEGLSADQMAQIEKIFKVVYPVDDHHFKVILHYGTLVIDGVTPNMINYFGRPYEGIAVFDGKKITVTGTLWNGNKIIDERLITPDGSMLFRVTIDP

SEQ ID NO: 2119 - DNA, 474 bp, Artificial Sequence
  Synthetic
gtcttcacactcgaagatttcgttggggactgggaacagacagccgcctacaacctggaccaagtccttgaacagggaggtgtgtccagtttgtttcagaatctcgccgtgtccgtaactccgatccaaaggattgtcctgagcggtgaaaatgccctgaagatcgacatccaggtcatcatcccgtatgaaggtctgagcgccgaccaaatggcccagatcgaaaaaatttttaaggtggtgtaccctgtggatgatcatcactttaaggtgatcctgcactatggcacactggtaatcgacggggttacgccgaacatgatcaactatttcggacggccgtatgaaggcatcgccgtgttcgacggcaaaaagatcactgtaacagggaccctgtggaacggcaacaaaattatcgacgagcgcctgatcacccccgacggctccatgctgttccgagtaaccatcaacccc

SEQ ID NO: 2120 - protein, 158 aa, Artificial Sequence
  Synthetic
VFTLEDFVGDWEQTAAYNLDQVLEQGGVSSLFQNLAVSVTPIQRIVLSGENALKIDIQVIIPYEGLSADQMAQIEKIFKVVYPVDDHHFKVILHYGTLVIDGVTPNMINYFGRPYEGIAVFDGKKITVTGTLWNGNKIIDERLITPDGSMLFRVTINP

SEQ ID NO: 2121 - DNA, 474 bp, Artificial Sequence
  Synthetic
gtcttcacactcgaagatttcgttggggactgggaacagacagccgcctacaacctggaccaagtccttgaacagggaggtgtgtccagtttgtttcagaatctcgccgtgtccgtaactccgatccaaaggattgtcctgagcggtgaaaatgccctgaagatcgacatccatgtcatcatcccgtatgaaggtctgagcgccgaccaaatggcccagatcgaaaaaatttttaaggtggtgtaccctgtggatgatcatcactttaaggtgatcatgcactatggcacactggtaatcgacggggttacgccgaacatgatcaactatttcggacggccgtatgaaggcatcgccgtgttcgacggcaaaaagatcactgtaacagggaccctgtggaacggcaacaaaattatcgacgagcgcctgatcacccccgacggctccatgctgttccgagtaaccatcaacccc

SEQ ID NO: 2122 - protein, 158 aa, Artificial Sequence
  Synthetic
VFTLEDFVGDWEQTAAYNLDQVLEQGGVSSLFQNLAVSVTPIQRIVLSGENALKIDIHVIIPYEGLSADQMAQIEKIFKVVYPVDDHHFKVIMHYGTLVIDGVTPNMINYFGRPYEGIAVFDGKKITVTGTLWNGNKIIDERLITPDGSMLFRVTINP

SEQ ID NO: 2123 - DNA, 474 bp, Artificial Sequence
  Synthetic
gtcttcacactcgaagatttcgttggggactgggaacagacagccgcctacaacctggaccaagtccttgaacagggaggtgtgtccagtttgtttcagaatctcgccgtgtccgtaactccgatccaaaggattgtcctgagcggtgaaaatgccctgaagatcgacatccatgtcatcatcccgtatgaaggtctgagcgccgaccaaatggcccagatcgaaaaaatttttaaggtggtgtaccctgtggatgatcatcactttaaggtgatcctgcactatggcacactggtaatcgacggggttacgccgaacatgatcaactatttcggacggctgtatgaaggcatcgccgtgttcgacggcaaaaagatcactgtaacagggaccctgtggaacggcaacaaaattatcgacgagcgcctgatcacccccgacggctccatgctgttccgagtaaccatcaacccc

SEQ ID NO: 2124 - protein, 158 aa, Artificial Sequence
  Synthetic
VFTLEDFVGDWEQTAAYNLDQVLEQGGVSSLFQNLAVSVTPIQRIVLSGENALKIDIHVIIPYEGLSADQMAQIEKIFKVVYPVDDHHFKVILHYGTLVIDGVTPNMINYFGRLYEGIAVFDGKKITVTGTLWNGNKIIDERLITPDGSMLFRVTINP

SEQ ID NO: 2125 - DNA, 474 bp, Artificial Sequence
  Synthetic
gtcttcacactcgaagatttcgttggggactgggaacagacagccgcctacaacctggaccaagtccttgaacagggaggtgtgtccagtttgtttcagaatctcgccgtgtccgtaactccgatccaaaggattgtcctgagcgacgaaaatgccctgaagatcgacatccatgtcatcatcccgtatgaaggtctgagcgccgaccaaatggcccagatcgaaaaaatttttaaggtggtgtaccctgtggatgatcatcactttaaggtgatcctgcactatggcacactggtaatcgacggggttacgccgaacatgatcaactatttcggacggccgtatgaaggcatcgccgtgttcgacggcaaaaagatcactgtaacagggaccctgtggaacggcaacaaaattatcgacgagcgcctgatcacccccgacggctccatgctgttccgagtaaccatcaacccc

SEQ ID NO: 2126 - protein, 158 aa, Artificial Sequence
  Synthetic
VFTLEDFVGDWEQTAAYNLDQVLEQGGVSSLFQNLAVSVTPIQRIVLSDENALKIDIHVIIPYEGLSADQMAQIEKIFKVVYPVDDHHFKVILHYGTLVIDGVTPNMINYFGRPYEGIAVFDGKKITVTGTLWNGNKIIDERLITPDGSMLFRVTINP

SEQ ID NO: 2127 - DNA, 441 bp, Artificial Sequence
  Synthetic
gtcttcacactcgaagatttcgttggggactgggaacagacagccgcctacaacctggaccaagtccttgaacagggaggtgtgtccagtttgtttcagaatctcgccgtgtccgtaactccgatccaaaggattgtcctgagcggtgaaaatgccctgaagatcgacatccatgtcatcatcccgtatgaaggtctgagcgccgaccaaatggcccagatcgaaaaaatttttaaggtggtgtaccctgtggatgatcatcactttaaggtgatcctgcactatggcacactggtaatcgacggggttacgccgaacatgatcaactatttcggacggccgtatgaaggcatcgccgtgttcgacggcaaaaagatcactgtaacagggaccctgtggaacggcaacaaaattatcgacgagcgcctgatcacccccgac

SEQ ID NO: 2128 - protein, 147 aa, Artificial Sequence
  Synthetic
VFTLEDFVGDWEQTAAYNLDQVLEQGGVSSLFQNLAVSVTPIQRIVLSGENALKIDIHVIIPYEGLSADQMAQIEKIFKVVYPVDDHHFKVILHYGTLVIDGVTPNMINYFGRPYEGIAVFDGKKITVTGTLWNGNKIIDERLITPD

SEQ ID NO: 2129 - DNA, 474 bp, Artificial Sequence
  Synthetic
gtcttcacactcgaagatttcgttggggactgggaacagacagccgcctacaacctggaccaagtccttgaacagggaggtgtgtccagtttgtttcagaatctcgccgtgtccgtaactccgatccaaaggattgtccggagcggtgaaaatgccctgaagatcgacatccatgtcatcatcccgtatgaaggtctgagcgccgaccaaatggcccagatcgaaaaaatttttaaggtggtgtaccctgtggatgatcatcactttaaggtgatcctgcactatggcacactggtaatcgacggggttacgccgaacatgatcaactatttcggacggccgtatgaaggcatcgccgtgttcgacggcaaaaagatcactgtaacagggaccctgtggaacggcaacaaaattatcgacgagcgcctgatcacccccgacggctccatgctgttccgagtaaccatcaacagc

SEQ ID NO: 2130 - protein, 158 aa, Artificial Sequence
  Synthetic
VFTLEDFVGDWEQTAAYNLDQVLEQGGVSSLFQNLAVSVTPIQRIVRSGENALKIDIHVIIPYEGLSADQMAQIEKIFKVVYPVDDHHFKVILHYGTLVIDGVTPNMINYFGRPYEGIAVFDGKKITVTGTLWNGNKIIDERLITPDGSMLFRVTINS

SEQ ID NO: 2131 - DNA, 474 bp, Artificial Sequence
  Synthetic
gtcttcacactcgaagatttcgttggggactgggaacagacagccgcctacaacctggaccaagtccttgaacagggaggtgtgtccagtttgtttcagaatctcgccgtgtccgtaactccgatccaaaggattgtccacagcggtgaaaatgccctgaagatcgacatccatgtcatcatcccgtatgaaggtctgagcgccgaccaaatggcccagatcgaaaaaatttttaaggtggtgtaccctgtggatgatcatcactttaaggtgatcctgcactatggcacactggtaatcgacggggttacgccgaacatgatcaactatttcggacggccgtatgaaggcatcgccgtgttcgacggcaaaaagatcactgtaacagggaccctgtggaacggcaacaaaattatcgacgagcgcctgatcacccccgacggctccatgctgttccgagtaaccatcaaccac

SEQ ID NO: 2132 - protein, 158 aa, Artificial Sequence
  Synthetic
VFTLEDFVGDWEQTAAYNLDQVLEQGGVSSLFQNLAVSVTPIQRIVHSGENALKIDIHVIIPYEGLSADQMAQIEKIFKVVYPVDDHHFKVILHYGTLVIDGVTPNMINYFGRPYEGIAVFDGKKITVTGTLWNGNKIIDERLITPDGSMLFRVTINH

SEQ ID NO: 2133 - DNA, 474 bp, Artificial Sequence
  Synthetic
gtcttcacactcgaagatttcgttggggactgggaacagacagccgcctacaacctggaccaagtccttgaacagggaggtgtgtccagtttgtttcagaatctcgccgtgtccgtaactccgatccaaaggattgtccggagcggtgaaaatgccctgaagatcgacatccatgtcatcatcccgtatgaaggtctgagcgccgaccaaatggcccagatcgaaaaaatttttaaggtggtgtaccctgtggatgatcatcactttaaggtgatcctgccctatggcacactggtaatcgacggggttacgccgaacatgatcaactatttcggacggccgtatgaaggcatcgccgtgttcgacggcaaaaagatcactgtaacagggaccctgtggaacggcaacaaaattatcgacgagcgcctgatcacccccgacggctccatgctgttccgagtaaccatcaacccc

SEQ ID NO: 2134 - protein, 158 aa, Artificial Sequence
  Synthetic
VFTLEDFVGDWEQTAAYNLDQVLEQGGVSSLFQNLAVSVTPIQRIVRSGENALKIDIHVIIPYEGLSADQMAQIEKIFKVVYPVDDHHFKVILPYGTLVIDGVTPNMINYFGRPYEGIAVFDGKKITVTGTLWNGNKIIDERLITPDGSMLFRVTINP

SEQ ID NO: 2135 - DNA, 474 bp, Artificial Sequence
  Synthetic
gtcttcacactcgaagatttcgttggggactgggaacagacagccgcctacaacctggaccaagtccttgaacagggaggtgtgtccagtttgctgcagaatctcgccgtgtccgtaactccgatccaaaggattgtccggagcggtgaaaatgccctgaagatcgacatccatgtcatcatcccgtatgaaggtctgagcgccgaccaaatggcccagatcgaaaaaatttttaaggtggtgtaccctgtggatgatcatcactttaaggtgatcctgccctatggcacactggtaatcgacggggttacgccgaacatgatcaactatttcggacggccgtatgaaggcatcgccgtgttcgacggcaaaaagatcactgtaacagggaccctgtggaacggcaacaaaattatcgacgagcgcctgatcacccccgacggctccatgctgttccgagtaaccatcaacccc

SEQ ID NO: 2136 - protein, 158 aa, Artificial Sequence
  Synthetic
VFTLEDFVGDWEQTAAYNLDQVLEQGGVSSLLQNLAVSVTPIQRIVRSGENALKIDIHVIIPYEGLSADQMAQIEKIFKVVYPVDDHHFKVILPYGTLVIDGVTPNMINYFGRPYEGIAVFDGKKITVTGTLWNGNKIIDERLITPDGSMLFRVTINP

SEQ ID NO: 2137 - DNA, 474 bp, Artificial Sequence
  Synthetic
gtcttcacactcgaagatttcgttggggactgggaacagacagccgcctacaacctggaccaagtccttgaacagggaggtgtgtccagtttgtttcagaatctcgccgtgtccgtaactccgatccaaaggattgtccggagcggtgaaaatgccctgaagatcgacatccatgtcatcatcccgtatgaaggtctgagcgccgaccaaatggcccagatcgaagagatttttaaggtggtgtaccctgtggatgatcatcactttaaggtgatcctgccctatggcacactggtaatcgacggggttacgccgaacatgatcaactatttcggacggccgtatgaaggcatcgccgtgttcgacggcaaaaagatcactgtaacagggaccctgtggaacggcaacaaaattatcgacgagcgcctgatcacccccgacggctccatgctgttccgagtaaccatcaacccc

SEQ ID NO: 2138 - protein, 158 aa, Artificial Sequence
  Synthetic
VFTLEDFVGDWEQTAAYNLDQVLEQGGVSSLFQNLAVSVTPIQRIVRSGENALKIDIHVIIPYEGLSADQMAQIEEIFKVVYPVDDHHFKVILPYGTLVIDGVTPNMINYFGRPYEGIAVFDGKKITVTGTLWNGNKIIDERLITPDGSMLFRVTINP

SEQ ID NO: 2139 - DNA, 474 bp, Artificial Sequence
  Synthetic
gtcttcacactcgaagatttcgttggggactgggaacagacagccgcctacaacctggaccaagtccttgaacagggaggtgtgtccagtttgtttcagaatctcgccgtgtccgtaactccgatccaaaggattgtccggagcggtgaaaatgccctgaagatcgacatccatgtcatcatcccgtatgaaggtctgagcgccgaccaaatggcccagatcgaaaaagtgtttaaggtggtgtaccctgtggatgatcatcactttaaggtgatcctgccctatggcacactggtaatcgacggggttacgccgaacatgatcaactatttcggacggccgtatgaaggcatcgccgtgttcgacggcaaaaagatcactgtaacagggaccctgtggaacggcaacaaaattatcgacgagcgcctgatcacccccgacggctccatgctgttccgagtaaccatcaacccc

SEQ ID NO: 2140 - protein, 158 aa, Artificial Sequence
  Synthetic
VFTLEDFVGDWEQTAAYNLDQVLEQGGVSSLFQNLAVSVTPIQRIVRSGENALKIDIHVIIPYEGLSADQMAQIEKVFKVVYPVDDHHFKVILPYGTLVIDGVTPNMINYFGRPYEGIAVFDGKKITVTGTLWNGNKIIDERLITPDGSMLFRVTINP

SEQ ID NO: 2141 - DNA, 474 bp, Artificial Sequence
  Synthetic
gtcttcacactcgaagatttcgttggggactgggaacagacagccgcctacaacctggaccaagtccttgaacagggaggtgtgtccagtttgctgcagaatctcgccgtgtccgtaactccgatccaaaggattgtccggagcggtgaaaatgccctgaagatcgacatccatgtcatcatcccgtatgaaggtctgagcgccgaccaaatggcccagatcgaaaaaatttttaaggtggtgtaccctgtggatgatcatcactttaaggtgatcctgccctatggcacactggtaatcgacggggttacgccgaacatgatcaactatttcggacggccgtatgaaggcatcgccgtgttcgacggcaaaaagatcactgtaacagggaccctgtggaacggcaacaaaattatcgacgagcgcctgatcacccccgacggctccatgctgttccgagtaaccatcaacagc

SEQ ID NO: 2142 - protein, 158 aa, Artificial Sequence
  Synthetic
VFTLEDFVGDWEQTAAYNLDQVLEQGGVSSLLQNLAVSVTPIQRIVRSGENALKIDIHVIIPYEGLSADQMAQIEKIFKVVYPVDDHHFKVILPYGTLVIDGVTPNMINYFGRPYEGIAVFDGKKITVTGTLWNGNKIIDERLITPDGSMLFRVTINS

SEQ ID NO: 2143 - DNA, 474 bp, Artificial Sequence
  Synthetic
gtcttcacactcgaagatttcgttggggactgggaacagacagccgcctacaacctggaccaagtccttgaacagggaggtgtgtccagtttgtttcagaatctcgccgtgtccgtaactccgatccaaaggattgtccggagcggtgaaaatgccctgaagatcgacatccatgtcatcatcccgtatgaaggtctgagcgccgaccaaatggcccagatcgaagagatttttaaggtggtgtaccctgtggatgatcatcactttaaggtgatcctgccctatggcacactggtaatcgacggggttacgccgaacatgatcaactatttcggacggccgtatgaaggcatcgccgtgttcgacggcaaaaagatcactgtaacagggaccctgtggaacggcaacaaaattatcgacgagcgcctgatcacccccgacggctccatgctgttccgagtaaccatcaacagc

SEQ ID NO: 2144 - protein, 158 aa, Artificial Sequence
  Synthetic
VFTLEDFVGDWEQTAAYNLDQVLEQGGVSSLFQNLAVSVTPIQRIVRSGENALKIDIHVIIPYEGLSADQMAQIEEIFKVVYPVDDHHFKVILPYGTLVIDGVTPNMINYFGRPYEGIAVFDGKKITVTGTLWNGNKIIDERLITPDGSMLFRVTINS

SEQ ID NO: 2145 - DNA, 474 bp, Artificial Sequence
  Synthetic
gtcttcacactcgaagatttcgttggggactgggaacagacagccgcctacaacctggaccaagtccttgaacagggaggtgtgtccagtttgtttcagaatctcgccgtgtccgtaactccgatccaaaggattgtccggagcggtgaaaatgccctgaagatcgacatccatgtcatcatcccgtatgaaggtctgagcgccgaccaaatggcccagatcgaaaaagtgtttaaggtggtgtaccctgtggatgatcatcactttaaggtgatcctgccctatggcacactggtaatcgacggggttacgccgaacatgatcaactatttcggacggccgtatgaaggcatcgccgtgttcgacggcaaaaagatcactgtaacagggaccctgtggaacggcaacaaaattatcgacgagcgcctgatcacccccgacggctccatgctgttccgagtaaccatcaacagc

SEQ ID NO: 2146 - protein, 158 aa, Artificial Sequence
  Synthetic
VFTLEDFVGDWEQTAAYNLDQVLEQGGVSSLFQNLAVSVTPIQRIVRSGENALKIDIHVIIPYEGLSADQMAQIEKVFKVVYPVDDHHFKVILPYGTLVIDGVTPNMINYFGRPYEGIAVFDGKKITVTGTLWNGNKIIDERLITPDGSMLFRVTINS

SEQ ID NO: 2147 - DNA, 474 bp, Artificial Sequence
  Synthetic
gtcttcacactcgaagatttcgttggggactgggaacagacagccgcctacaacctggaccaagtccttgaacagggaggtgtgtccagtttgctgcagaatctcgccgtgtccgtaactccgatccaaaggattgtccggagcggtgaaaataccctgaagatcgacatccatgtcatcatcccgtatgaaggtctgagcgccgaccaaatggcccagatcgaagaggtgtttaaggtggtgtaccctgtggatgatcatcactttaaggtgatcctgccctatggcacactggtaatcgacggggttacgccgaacatgctgaactatttcggacggccgtatgaaggcatcgccgtgttcgacggcaaaaagatcactgtaacagggaccctgtggaacggcaacaaaattatcgacgagcgcctgatcacccccgacggctccatgctgttccgagtaaccatcaacagc

SEQ ID NO: 2148 - protein, 158 aa, Artificial Sequence
  Synthetic
VFTLEDFVGDWEQTAAYNLDQVLEQGGVSSLLQNLAVSVTPIQRIVRSGENTLKIDIHVIIPYEGLSADQMAQIEEVFKVVYPVDDHHFKVILPYGTLVIDGVTPNMLNYFGRPYEGIAVFDGKKITVTGTLWNGNKIIDERLITPDGSMLFRVTINS

SEQ ID NO: 2149 - DNA, 474 bp, Artificial Sequence
  Synthetic
gtcttcacactcgaagatttcgttggggactgggaacagacagccgcctacaacctggaccaagtccttgaacagggaggtgtgtccagtttgctgcagaatctcgccgtgtccgtaactccgatccaaaggattgtccggagcggtgaaaatgccctgaagatcgacatccatgtcatcatcccgtatgaaggtctgagcgccgaccaaatggcccagatcgaagaggtgtttaaggtggtgtaccctgtggatgatcatcactttaaggtgatcctgccctatggcacactggtaatcgacggggttacgccgaacatgctgaactatttcggacggccgtatgaaggcatcgccgtgttcgacggcaaaaagatcactgtaacagggaccctgtggaacggcaacaaaattatcgacgagcgcctgatcacccccgacggctccatgctgttccgagtaaccatcaacagc

SEQ ID NO: 2150 - protein, 158 aa, Artificial Sequence
  Synthetic
VFTLEDFVGDWEQTAAYNLDQVLEQGGVSSLLQNLAVSVTPIQRIVRSGENALKIDIHVIIPYEGLSADQMAQIEEVFKVVYPVDDHHFKVILPYGTLVIDGVTPNMLNYFGRPYEGIAVFDGKKITVTGTLWNGNKIIDERLITPDGSMLFRVTINS

SEQ ID NO: 2151 - DNA, 474 bp, Artificial Sequence
  Synthetic
gtcttcacactcgaagatttcgttggggactgggaacagacagccgcctacaacctggaccaagtccttgaacagggaggtgtgtccagtttgctgcagaatctcgccgtgtccgtaactccgatccaaaggattgtccggagcggtgaaaataccctgaagatcgacatccatgtcatcatcccgtatgaaggtctgagcgccgaccaaatggcccagatcgaaaaagtgtttaaggtggtgtaccctgtggatgatcatcactttaaggtgatcctgccctatggcacactggtaatcgacggggttacgccgaacatgctgaactatttcggacggccgtatgaaggcatcgccgtgttcgacggcaaaaagatcactgtaacagggaccctgtggaacggcaacaaaattatcgacgagcgcctgatcacccccgacggctccatgctgttccgagtaaccatcaacagc

SEQ ID NO: 2152 - protein, 158 aa, Artificial Sequence
  Synthetic
VFTLEDFVGDWEQTAAYNLDQVLEQGGVSSLLQNLAVSVTPIQRIVRSGENTLKIDIHVIIPYEGLSADQMAQIEKVFKVVYPVDDHHFKVILPYGTLVIDGVTPNMLNYFGRPYEGIAVFDGKKITVTGTLWNGNKIIDERLITPDGSMLFRVTINS

SEQ ID NO: 2153 - DNA, 474 bp, Artificial Sequence
  Synthetic
gtcttcacactcgaagatttcgttggggactgggaacagacagccgcctacaacctggaccaagtccttgaacagggaggtgtgtccagtttgctgcagaatctcgccgtgtccgtaactccgatccaaaggattgtccggagcggtgaaaataccctgaagatcgacatccatgtcatcatcccgtatgaaggtctgagcgccgaccaaatggcccagatcgaagagatttttaaggtggtgtaccctgtggatgatcatcactttaaggtgatcctgccctatggcacactggtaatcgacggggttacgccgaacatgctgaactatttcggacggccgtatgaaggcatcgccgtgttcgacggcaaaaagatcactgtaacagggaccctgtggaacggcaacaaaattatcgacgagcgcctgatcacccccgacggctccatgctgttccgagtaaccatcaacagc

SEQ ID NO: 2154 - protein, 158 aa, Artificial Sequence
  Synthetic
VFTLEDFVGDWEQTAAYNLDQVLEQGGVSSLLQNLAVSVTPIQRIVRSGENTLKIDIHVIIPYEGLSADQMAQIEEIFKVVYPVDDHHFKVILPYGTLVIDGVTPNMLNYFGRPYEGIAVFDGKKITVTGTLWNGNKIIDERLITPDGSMLFRVTINS

SEQ ID NO: 2155 - DNA, 474 bp, Artificial Sequence
  Synthetic
gtcttcacactcgaagatttcgttggggactgggaacagacagccgcctacaacctggaccaagtccttgaacagggaggtgtgtccagtttgctgcagaatctcgccgtgtccgtaactccgatccaaaggattgtccggagcggtgaaaataccctgaagatcgacatccatgtcatcatcccgtatgaaggtctgagcgccgaccaaatggcccagatcgaagaggtgtttaaggtggtgtaccctgtggatgatcatcactttaaggtgatcctgccctatggcacactggtaatcgacggggttacgccgaacatgatcaactatttcggacggccgtatgaaggcatcgccgtgttcgacggcaaaaagatcactgtaacagggaccctgtggaacggcaacaaaattatcgacgagcgcctgatcacccccgacggctccatgctgttccgagtaaccatcaacagc

SEQ ID NO: 2156 - protein, 158 aa, Artificial Sequence
  Synthetic
VFTLEDFVGDWEQTAAYNLDQVLEQGGVSSLLQNLAVSVTPIQRIVRSGENTLKIDIHVIIPYEGLSADQMAQIEEVFKVVYPVDDHHFKVILPYGTLVIDGVTPNMINYFGRPYEGIAVFDGKKITVTGTLWNGNKIIDERLITPDGSMLFRVTINS

SEQ ID NO: 2157 - protein, 171 aa, Artificial Sequence
  Synthetic
MVFTLEDFVGDWRQTAGYNLDQVLEQGGVSSLFQNLGVSVTPIQRIVLSGENGLKIDIHVIIPYEGLSGDQMGQIEKIFKVVYPVDDHHFKVILHYGTLVIDGVTPNMIDYFGRPYEGIAVFDGKKITVTGTLWNGNKIIDERLINPDGSLLFRVTINGVTGWRLCERILA

SEQ ID NO: 2158 - DNA, 939 bp, Artificial Sequence
  Synthetic
ctcgagccaaccactgaggatctgtactttcagagcgataacgatggatccgaaatcggtactggctttccattcgacccccattatgtggaagtcctgggcgagcgcatgcactacgtcgatgttggtccgcgcgatggcacccctgtgctgttcctgcacggtaacccgacctcctcctacgtgtggcgcaacatcatcccgcatgttgcaccgacccatcgctgcattgctccagacctgatcggtatgggcaaatccgacaaaccagacctgggttatttcttcgacgaccacgtccgcttcatggatgccttcatcgaagccctgggtctggaagaggtcgtcctggtcattcacgactggggctccgctctgggtttccactgggccaagcgcaatccagagcgcgtcaaaggtattgcatttatggagttcatccgccctatcccgacctgggacgaatggccagaatttgcccgcgagaccttccaggccttccgcaccaccgacgtcggccgcaagctgatcatcgatcagaacgtttttatcgagggtacgctgccgatgggtgtcgtccgcccgctgactgaagtcgagatggaccattaccgcgagccgttcctgaatcctgttgaccgcgagccactgtggcgcttcccaaacgagctgccaatcgccggtgagccagcgaacatcgtcgcgctggtcgaagaatacatggactggctgcaccagtcccctgtcccgaagctgctgttctggggcaccccaggcgttctgatcccaccggccgaagccgctcgcctggccaaaagcctgcctaactgcaaggctgtggacatcggcccgggtctgaatctgctgcaagaagacaacccggacctgatcggcagcgagatcgcgcgctggctgtctactctggagatttccggttaa

SEQ ID NO: 2159 - protein, 312 aa, Artificial Sequence
  Synthetic
LEPTTEDLYFQSDNDGSEIGTGFPFDPHYVEVLGERMHYVDVGPRDGTPVLFLHGNPTSSYVWRNIIPHVAPTHRCIAPDLIGMGKSDKPDLGYFFDDHVRFMDAFIEALGLEEVVLVIHDWGSALGFHWAKRNPERVKGIAFMEFIRPIPTWDEWPEFARETFQAFRTTDVGRKLIIDQNVFIEGTLPMGVVRPLTEVEMDHYREPFLNPVDREPLWRFPNELPIAGEPANIVALVEEYMDWLHQSPVPKLLFWGTPGVLIPPAEAARLAKSLPNCKAVDIGPGLNLLQEDNPDLIGSEIARWLSTLEISG

SEQ ID NO: 2160 - DNA, 939 bp, Artificial Sequence
  Synthetic
atggcagaaatcggtactggctttccattcgacccccattatgtggaagtcctgggcgagcgcatgcactacgtcgatgttggtccgcgcgatggcacccctgtgctgttcctgcacggtaacccgacctcctcctacgtgtggcgcaacatcatcccgcatgttgcaccgacccatcgctgcattgctccagacctgatcggtatgggcaaatccgacaaaccagacctgggttatttcttcgacgaccacgtccgcttcatggatgccttcatcgaagccctgggtctggaagaggtcgtcctggtcattcacgactggggctccgctctgggtttccactgggccaagcgcaatccagagcgcgtcaaaggtattgcatttatggagttcatccgccctatcccgacctgggacgaatggccagaatttgcccgcgagaccttccaggccttccgcaccaccgacgtcggccgcaagctgatcatcgatcagaacgtttttatcgagggtacgctgccgatgggtgtcgtccgcccgctgactgaagtcgagatggaccattaccgcgagccgttcctgaatcctgttgaccgcgagccactgtggcgcttcccaaacgagctgccaatcgccggtgagccagcgaacatcgtcgcgctggtcgaagaatacatggactggctgcaccagtcccctgtcccgaagctgctgttctggggcaccccaggcgttctgatcccaccggccgaagccgctcgcctggccaaaagcctgcctaactgcaaggctgtggacatcggcccgggtctgaatctgctgcaagaagacaacccggacctgatcggcagcgagatcgcgcgctggctgtcgacgctcgagatttccggcgagccaaccactgaggatctgtactttcagagcgataacgcgatcgcc

SEQ ID NO: 2161 - protein, 313 aa, Artificial Sequence
  Synthetic
MAEIGTGFPFDPHYVEVLGERMHYVDVGPRDGTPVLFLHGNPTSSYVWRNIIPHVAPTHRCIAPDLIGMGKSDKPDLGYFFDDHVRFMDAFIEALGLEEVVLVIHDWGSALGFHWAKRNPERVKGIAFMEFIRPIPTWDEWPEFARETFQAFRTTDVGRKLIIDQNVFIEGTLPMGVVRPLTEVEMDHYREPFLNPVDREPLWRFPNELPIAGEPANIVALVEEYMDWLHQSPVPKLLFWGTPGVLIPPAEAARLAKSLPNCKAVDIGPGLNLLQEDNPDLIGSEIARWLSTLEISGEPTTEDLYFQSDNAIA
